(19) United States
(12) Patent Application Publication
(10) Pub. No.: US 2020/0046854 A1
(43) Pub. Date: Feb. 13, 2020

(54) PREVENTION OF MUSCULAR DYSTROPHY BY CRISPR/CPF1-MEDIATED GENE EDITING

(71) Applicant: The Board of Regents of the University of Texas System, Austin, TX (US)

(72) Inventors: Yu ZHANG, Dallas, TX (US); Chengzu LONG, New York, NY (US); Rhonda BASSEL-DUBY, Dallas, TX (US); Eric OLSON, University Park, TX (US)

(73) Assignee: The Board of Regents of the University of Texas System, Austin, TX (US)

(21) Appl. No.: 16/464,124

(22) PCT Filed: Nov. 28, 2017
(86) PCT No.: PCT/US2017/063468

§ 371 Date: May 24, 2019

Related U.S. Application Data
(60) Provisional application No. 62/426,853, filed on Nov. 28, 2016.

(51) Int. Cl. A61K 48/00; C12N 9/22; C12N 15/11; C12N 15/86; C12N 7/00; C12N 5/0735; C12N 5/074; A61K 9/00; A61P 21/00

(52) U.S. Cl. CPC A61K 48/0075; C12N 9/22; C12N 15/11; C12N 15/86; C12N 7/00; C12N 5/0606; C12N 2830/50; A61K 9/0019; A61P 21/00; C12N 2800/80; C12N 2310/20; C12N 2750/14143; C12N 5/0696

(57) ABSTRACT

Duchenne muscular dystrophy (DMD) is an inherited X-linked disease caused by mutations in the gene encoding dystrophin, a protein required for muscle fiber integrity. The disclosure reports CRISPR/Cpf1-mediated gene editing (Myo-editing) is effective at correcting the dystrophin gene mutation in the mdx mice, a model for DMD. Further, the disclosure reports optimization of germline editing of mdx mice by engineering the permanent skipping of mutant exon and extending exon skipping to also correct the disease by post-natal delivery of adeno-associated virus (AAV). AAV-mediated Myo-editing can efficiently rescue the reading frame of dystrophin in mdx mice in vivo. The disclosure reports means of Myo-editing-mediated exon skipping has been successfully advanced from somatic tissues in mice to human DMD patients-derived iPSCs (induced pluripotent stem cells). Custom Myo-editing was performed on iPSCs from patients with differing mutations and successfully restored dystrophin protein expression for all mutations in iPSCs-derived cardiomyocytes.

### PRIORITY CLAIM

[0001] This application is a national phase application under 35 U.S.C. § 371 of International Application No. PCT/US2017/063468, filed Nov. 28, 2017, which claims priority to U.S. Provisional Patent Application Ser. No. 62/426,853 which was filed on Nov. 28, 2016, and entitled “Prevention of Muscular Dystrophy by CRISPR/Cpf1-Mediated Gene Editing,” the disclosure of each of which is hereby incorporated by reference in its entirety.

### FEDERAL FUNDING SUPPORT CLAUSE

[0002] This invention was made with government support under DK-099653 and U54-HD 087351 awarded by National Institutes of Health. The government has certain rights in the invention.

### SEQUENCE LISTING

[0003] The instant application contains a Sequence Listing which has been submitted electronically in ASCII format and is hereby incorporated by reference in its entirety. Said ASCII copy, created on May 16, 2019, is named UTSDP3124US.txt and is 1,135 KB in size.

### FIELD OF THE DISCLOSURE

[0004] The present disclosure relates to the fields of molecular biology, medicine and genetics. More particularly, the disclosure relates to the use of genome editing to treat Duchenne muscular dystrophy (DMD).

### BACKGROUND

[0005] Duchenne muscular dystrophy (DMD) is an X-linked recessive disease caused by mutations in the gene coding for dystrophin, which is a large cytoskeletal protein essential for integrity of muscle cell membranes. DMD causes progressive muscle weakness, culminating in premature death by the age of 30, generally from cardiomyopathy. There is no effective treatment for this disease. Numerous approaches to rescue dystrophin expression in DMD have been attempted, including delivery of truncated dystrophin or utrophin by recombinant adeno-associated virus (rAAV) and skipping of mutant exons with anti-sense oligonucleotides and small molecules. However, these approaches cannot correct DMD mutations or permanently restore dystrophin expression. Accordingly, there is a need in the art for compositions and methods for treating DMD that correct DMD mutations to address the underlying cause of the disease, thereby permanently restore dystrophin expression.

### SUMMARY

[0006] The disclosure provides a composition comprising a sequence encoding a Cpf1 polypeptide and a sequence encoding a DMD guide RNA (gRNA), wherein the DMD gRNA targets a dystrophin splice site, and wherein the DMD gRNA comprises any one of SEQ ID No. 448 to 770. In some embodiments, the sequence encoding the Cpf1 polypeptide is isolated or derived from a sequence encoding a Lachnospiraceae Cpf1 polypeptide. In some embodiments, the sequence encoding the Cpf1 polypeptide is isolated or derived from a sequence encoding an Acidaminococcus Cpf1 polypeptide. In some embodiments, the sequence encoding the Cpf1 polypeptide or the sequence encoding the DMD gRNA comprises an RNA sequence. In some embodiments, the RNA sequence is an mRNA sequence. In some embodiments, the RNA sequence comprises at least one chemically-modified nucleotide. In some embodiments, the sequence encoding the Cpf1 polypeptide comprises a DNA sequence.

[0007] In some embodiments, a first vector comprises the sequence encoding the Cpf1 polypeptide and a second vector comprises the sequence encoding the DMD gRNA. In some embodiments, the first vector or the sequence encoding the Cpf1 polypeptide further comprises a first polyA sequence. In some embodiments, the second vector or the sequence encoding the DMD gRNA further comprises a second polyA sequence. In some embodiments, the first vector or the second vector further comprises a sequence encoding a detectable marker. In some embodiments, the detectable marker is a fluorescent maker.

[0008] In some embodiments, the first vector or the sequence encoding the Cpf1 polypeptide further comprises a first promoter sequence. In some embodiments, the second vector or the sequence encoding the DMD gRNA further comprises a second promoter sequence. In some embodiments, the promoter first promoter sequence and the second promoter sequence are identical. In some embodiments, the first promoter sequence and the second promoter sequence are not identical. In some embodiments, the first promoter sequence or the second promoter sequence comprises a constitutive promoter. In some embodiments, the first promoter sequence or the second promoter sequence comprises an inducible promoter. In some embodiments, the first promoter sequence or the second promoter sequence comprises a muscle-cell specific promoter. In some embodiments, the muscle-cell specific promoter is a myosin light chain-2 promoter, an α-actin promoter, a troponin 1 promoter, a Na⁺/Ca²⁺ exchanger promoter, a dystrophin promoter, an α7 integrin promoter, a brain natriuretic peptide promoter, an αB-crystallin/small heat shock protein promoter, an a-myosin heavy chain promoter, or an ANF promoter.

[0009] In some embodiments, the first vector or the second vector further comprises a sequence encoding 2A-like self-cleaving domain. In some embodiments, the sequence encoding 2A-like self-cleaving domain comprises a TaV-2A peptide.

[0010] In some embodiments, the vector comprises the sequence encoding the Cpf1 polypeptide and the sequence encoding the DMD gRNA. In embodiments, the vector further comprises a polyA sequence. In embodiments, the vector further comprises a promoter sequence. In embodiments, the promoter sequence comprises a constitutive promoter. In further embodiments, the promoter sequence comprises an inducible promoter. In embodiments, the promoter sequence comprises a muscle-cell specific promoter. In some embodiments, the muscle-cell specific promoter is a myosin light chain-2 promoter, an a-actin promoter, a troponin 1 promoter, a Na⁺/Ca²⁺ exchanger promoter, a dystrophin promoter, an α7 integrin promoter, a brain natriuretic peptide promoter, an αB-crystallin/small heat shock protein promoter, an α-myosin heavy chain promoter, or an ANF promoter.

[0011] In embodiments, the composition comprises a sequence codon optimized for expression in a mammalian cell. In further embodiments, the composition comprises a sequence codon optimized for expression in a human cell. In embodiments, the sequence encoding the Cpf1 polypeptide is codon optimized for expression in human cells.

[0012] In some embodiments, the splice site is a splice donor site. In some embodiments, the splice site is a splice acceptor site.

[0013] In further embodiments, the first vector or the second vector is a non-viral vector. In embodiments, the non-viral vector is a plasmid. In embodiments, a liposome or a nanoparticle comprises the first vector or the second vector.

[0014] In embodiments, the first vector or the second vector is a viral vector. In embodiments, the viral vector is an adeno-associated viral (AAV) vector. In embodiments, the AAV vector is replication-defector or conditionally replication defective. In embodiments, the AAV vector is a recombinant AAV vector. In some embodiments, the AAV vector comprises a sequence isolated or derived from an AAV vector of serotype AAV1, AAV2, AAV3, AAV4, AAV5, AAV6, AAV7, AAV8, AAV9, AAV10, AAV11 or any combination thereof.

[0015] In some embodiments, the composition further comprises a single-stranded DMD oligonucleotide. In some embodiments, the composition further comprises a pharmaceutically acceptable carrier.

[0016] Also provided is a cell comprising a composition of the disclosure. In embodiments, the cell is a muscle cell, a satellite cell or a precursor thereof. In some embodiments, the cell is an iPSC or an iCM.

[0017] Also provided is a composition comprising a cell of the instant disclosure.

[0018] Also provided is a method of correcting a dystrophin gene defect comprising contacting a cell and a composition of the disclosure under conditions suitable for expression of the Cpf1 polypeptide and the gRNA, wherein the Cpf1 polypeptide disrupts the dystrophin splice site; and wherein disruption of the splice site results in selective skipping of a mutant DMD exon. In some embodiments, the mutant DMD exon is exon 23. In some embodiments, the mutant DMD exon is exon 51. In embodiments, the cell is in vivo, ex vivo, in vitro or in situ.

[0019] The disclosure also provides a of treating muscular dystrophy in a subject in need thereof comprising administering to the subject a therapeutically effective amount of a composition according to the instant disclosure. In embodiments, the composition is administered locally. In embodiments, the composition is administered directly to a muscle tissue. In embodiments, the composition is administered by intramuscular infusion or injection. In embodiments, the muscle tissue comprises a tibialis anterior tissue, a quadricep tissue, a soleus tissue, a diaphragm tissue or a heart tissue. In some embodiments, the composition is administered systemically. In some embodiments, the composition is administered by intravenous infusion or injection.

[0020] In embodiments, following administration of the composition, the subject exhibits normal dystrophin-positive myofibers, and mosaic dystrophin-positive myofibers containing centralized nuclei, or a combination thereof. In some embodiments, following administration of the composition, the subject exhibits an emergence or an increase in a level of abundance of normal dystrophin-positive myofibers when compared to an absence or a level of abundance of normal dystrophin-positive myofibers prior to administration of the composition. In some embodiments, following administration of the composition, the subject exhibits an emergence or an increase in a level of abundance of mosaic dystrophin-positive myofibers containing centralized nuclei when compared to an absence or an level of abundance of mosaic dystrophin-positive myofibers containing centralized nuclei prior to administration of the composition. In some embodiments, the subject exhibits a decreased serum CK level when compared to a serum CK level prior to administration of the composition. In embodiments, following administration of the composition, the subject exhibits improved grip strength when compared to a grip strength prior to administration of the composition.

[0021] In some embodiments, the method comprises administering a therapeutically effective amount of a composition disclosed herein, wherein the cell is autologous. In some embodiments, the method comprises administering a therapeutically effective amount of the composition, wherein the cell is allogeneic.

[0022] In embodiments, the subject is a neonate, an infant, a child, a young adult, or an adult. In embodiments, the subject has muscular dystrophy. In embodiments, the subject is a genetic carrier for muscular dystrophy. In some embodiments, the subject is male. In some embodiments, the subject is female. In some embodiments, the subject appears to be asymptomatic and wherein a genetic diagnosis reveals a mutation in one or both copies of a DMD gene that impairs function of the DMD gene product. In some embodiments, the subject presents an early sign or symptom of muscular dystrophy. In some embodiments, the early sign or symptom of muscular dystrophy comprises loss of muscle mass or proximal muscle weakness. In embodiments, the loss of muscle mass or proximal muscle weakness occurs in one or both leg(s) and/or a pelvis, followed by one or more upper body muscle(s). In embodiments, the early sign or symptom of muscular dystrophy further comprises pseudohypertrophy, low endurance, difficulty standing, difficulty walking, and/or difficulty ascending a staircase or a combination thereof. In embodiments, the subject presents a progressive sign or symptom of muscular dystrophy. In embodiments, the progressive sign or symptom of muscular dystrophy comprises muscle tissue wasting, replacement of muscle tissue with fat, or replacement of muscle tissue with fibrotic tissue. In embodiments, the subject presents a later sign or symptom of muscular dystrophy. In some embodiments, the later sign or symptom of muscular dystrophy comprises abnormal bone development, curvature of the spine, loss of movement, and paralysis. In embodiments, the subject presents a neurological sign or symptom of muscular dystrophy. In embodiments, the neurological sign or symptom of muscular dystrophy comprises intellectual impairment and paralysis. In embodiments, administration of the composition occurs prior to the subject presenting one or more progressive, later or neurological signs or symptoms of muscular dystrophy. In some embodiments, the subject is less than 10 years old. In some embodiments, the subject is less than 5 years old. In some embodiments, the subject is less than 2 years old.

[0023] The disclosure also provides a use of a therapeutically-effective amount of a composition for treating muscular dystrophy in a subject in need thereof.

[0024] It is contemplated that any method or composition described herein can be implemented with respect to any other method or composition described herein.

[0025] Other objects, features and advantages of the present disclosure will become apparent from the following detailed description. It should be understood, however, that the detailed description and the specific examples, while indicating specific embodiments of the disclosure, are given by way of illustration only, since various changes and modifications within the spirit and scope of the disclosure will become apparent to those skilled in the art from this detailed description.

### BRIEF DESCRIPTION OF THE DRAWINGS

[0026] The following drawings form part of the present specification and are included to further demonstrate certain aspects of the present disclosure. The disclosure may be better understood by reference to one or more of these drawings in combination with the detailed description of specific embodiments presented herein.

[0027] FIGS. 1A-E. Correction of DMD mutations by Cpf1-mediated genome editing. (FIG. 1A) A DMD deletion of exons 48-50 results in splicing of exon 47 to 51, generating an out-of-frame mutation of dystrophin. Two strategies were used for the restoration of dystrophin expression by Cpf1. In the “reframing” strategy, small INDELs in exon 51 restore the protein reading frame of dystrophin. The “exon skipping” strategy is achieved by disruption of the splice acceptor of exon 51, which results in splicing of exon 47 to 52 and restoration of the protein reading frame. (FIG. 1B) The 3′ end of an intron is T-rich, which generates Cpf1 PAM sequences enabling genome cleavage by Cpf1. (FIG. 1C) Illustration of Cpf1 gRNA targeting DMD exon 51. The T-rich PAM (red line) is located upstream of exon 51 near the splice acceptor site. The sequence of the Cpf1 g1 gRNA targeting exon 51 is shown, highlighting the complementary nucleotides in blue. Cpf1 cleavage produces a staggered-end distal to the PAM site (demarcated by red arrowheads). The 5′ region of exon 51 is shaded in light blue. Exon sequence is upper case. Intron sequence is lower case. (FIG. 1D) Illustration of a plasmid encoding human codon-optimized Cpf1 (hCpf1) with a nuclear localization signal (NLS) and 2A-GFP. The plasmid also encodes a Cpf1 gRNA driven by the U6 promoter. Cells transfected with this plasmid express GFP, allowing for selection of Cpf1-expressing cells by FACS. (FIG. 1E) T7E1 assays using human 293T cells or DMD iPSCs (RIKEN51) transfected with plasmid expressing LbCpf1 or AsCpf1, gRNA and GFP show genome cleavage at DMD exon 51. Red arrowheads point to cleavage products. M, marker.

[0028] FIGS. 2A-I. DMD iPSC-derived cardiomyocytes express dystrophin after Cpf1-mediated genome editing by reframing. (FIG. 2A) DMD skin fibroblast-derived iPSCs were edited by Cpf1 using gRNA (corrected DMD-iPSCs) and then differentiated into cardiomyocytes (corrected cardiomyocytes) for analysis of genetic correction of the DMD mutation. (FIG. 2B) A DMD deletion of exons 48-50 results in splicing of exon 47 to 51, generating an out-of-frame mutation of dystrophin. Forward primer (F) targeting exon 47 and reverse primer (R) targeting exon 52 were used in RT-PCR to confirm the reframing strategy by Cpf1-meditated genome editing in cardiomyocytes. Uncorrected cardiomyocytes lack exons 48-50. In contrast, after reframing, exon 51 is placed back in-frame with exon 47. (FIG. 2C) Sequencing of representative RT-PCR products shows that uncorrected DMD iPSC-derived cardiomyocytes have a premature stop codon in exon 51, which creates a nonsense mutation. After Cpf1-mediated reframing, the ORF of dystrophin is restored. Dashed red line denotes exon boundary. (FIG. 2D) Western blot analysis shows dystrophin expression in a mixture of DMD iPSC-derived cardiomyocytes edited by reframing with LbCpf1 or AsLpf1 and g1 gRNA. Even without clonal selection, Cpf1-mediated reframing is efficient and sufficient to restore dystrophin expression in the cardiomyocyte mixture. αMHC is loading control. (FIG. 2E) Immunocytochemistry shows dystrophin expression in iPSC-derived cardiomyocyte (CM) mixtures following LbCpf1- or AsCpf1-mediated reframing. Dystrophin staining (red); Troponin I staining (green). Scale bar=100 microns. (FIG. 2F) Western blot analysis shows dystrophin expression in single clones (#2 and #5) of iPSC-derived cardiomyocytes following clonal selection after LbCpf1-mediated reframing. αMHC is loading control. (FIG. 2G) Immunocytochemistry showing dystrophin expression in clone #2 LbCpf1-edited iPSC-derived cardiomyocytes. Scale bar=100 microns. (FIG. 2H) Quantification of mitochondrial DNA copy number in single clones (#2 and #5) of LbCpf1-edited iPSC-derived cardiomyocytes. Data are represented as mean±SEM (n=3). (&) P<0.01; (#) P<0.005; (ns) not significant. (FIG. 2I) Basal oxygen consumption rate (OCR) of single clones (#2 and #5) of LbCpf1-edited iPSC-derived cardiomyocytes, and OCR in response to oligomycin, FCCP, and Rotenone and Antimycin A, normalized to cell number (order left to right for each test is the same as FIG. 2H). Data are represented as mean±SEM (n=5). (*) P<0.05; (&) P<0.01; (#) P<0.005; (ns) not significant.

[0029] FIGS. 3A-H. DMD iPSC-derived cardiomyocytes express dystrophin after Cpf1-mediated exon skipping. (FIG. 3A) Two gRNAs, either gRNA (g2 or g3), which target intron 50, and the other (g1), which targets exon 51, were used to direct Cpf1-mediated removal of the exon 51 splice acceptor site. (FIG. 3B) T7E1 assay using 293T cells transfected with LbCpf1 and gRNA2 (g2) or gRNA3 (g3) shows cleavage of the DMD locus at intron 50. Red arrowheads denote cleavage products. M, marker. (FIG. 3C) PCR products of genomic DNA isolated from DMD-iPSCs transfected with a plasmid expressing LbCpf1, g1+g2 and GFP. The lower band (red arrowhead) indicates removal of the exon 51 splice acceptor site. (FIG. 3D) Sequence of the lower PCR band from panel c shows a 200-bp deletion, spanning from the 3′-end of intron 50 to the 5′-end of exon 51. This confirms removal of the “ag” splice acceptor of exon 51. The sequence of the uncorrected allele is shown above that of the LbCpf1-edited allele. (FIG. 3E) RT-PCR of iPSC-derived cardiomyocytes using primer sets described in FIG. 2B. The 700-bp band in the WT lane is the dystrophin transcript from exon 47-52; the 300-bp band in the uncorrected lane is the dystrophin transcript from exon 47-52 with exon 48-50 deletion; and the lower band in the g1+g2 mixture lane (edited by LbCpf1) shows exon 51 skipping. (FIG. 3F) Sequence of the lower band from panel e (g1+g2 mixture lane) confirms skipping of exon 51, which reframed the DMD ORF. (FIG. 3G) Western blot analysis shows dystrophin protein expression in iPSC-derived cardiomyocyte mixtures after exon 51 skipping by LbCpf1 with g1+g2. αMHC is loading control. (FIG. 3H) Immunocytochemistry shows dystrophin expression in iPSC-derived cardiomyocyte mixtures (CMs) following Cpf1-mediated exon skipping with g1+g2 gRNA compared to WT and uncorrected CMs. Dystrophin staining (red). Troponin I staining (green). Scale bar=100 microns.

[0030] FIGS. 4A-D. CRISPR-Cpf1-mediated editing of exon 23 of the mouse DMD gene. (FIG. 4A) Illustration of mouse Dmd locus highlighting the mutation at exon 23. Sequence shows the nonsense mutation caused by C to T transition, which creates a premature stop codon. (FIG. 4B) Illustration showing the targeting location of gRNAs (g1, g2 and g3) (shown in light blue) on exon 23 of the Dmd gene. Red line represents LbCpf1 PAM. (FIG. 4C) T7E1 assay using mouse 10T1/2 cells transfected with LbCpf1 or AsCpf1 with different gRNAs (g1, g2 or g3) targeting exon 23 shows that LbCpf1 and AsCpf1 have different cleavage efficiency at the Dmd exon 23 locus. Red arrowheads show cleavage products of genome editing. M, marker. (FIG. 4D) Illustration of LbCpf1-mediated gRNA (g2) targeting of Dmd exon 23. Red arrowheads indicate the cleavage site. The ssODN HDR template contains the mdx correction, four silent mutations (green) and a TseI restriction site (underlined).

[0031] FIGS. 5A-F. CRISPR-LbCpf1-mediated Dmd correction in mdx mice. (FIG. 5A) Strategy of gene correction in mdx mice by LbCpf1-mediated germline editing. Zygotes from intercrosses of mdx parents were injected with gene editing components (LbCpf1 mRNA, g2 gRNA and ssODN) and reimplanted into pseudo-pregnant mothers, which gave rise to pups with gene correction (mdx-C). (FIG. 5B) Illustration showing LbCpf1 correction of mdx allele by HDR or NHEJ. (FIG. 5C) Genotyping results of LbCpf1-edited mdx mice. Top panel shows T7E1 assay. Blue arrowhead denotes uncleaved DNA and red arrowhead shows T7E1 cleaved DNA. Bottom panel shows TseI RFLP assay. Blue arrowhead denotes uncorrected DNA. Red arrowhead points to TseI cleavage indicating HDR correction. mdx-C1-C5 denotes LbCpf1-edited mdx mice. (FIG. 5D) Top panel shows sequence of WT Dmd exon 23. Middle panel shows sequence of mdx Dmd exon 23 with C to T mutation, which generates a STOP codon. Bottom panel shows sequence of Dmd exon 23 with HDR correction by LbCpf1-mediated editing. Black arrow points to silent mutations introduced by the ssODN HDR template. (FIG. 5E) H&E of tibialis anterior (TA) and gastrocnemius/plantaris (G/P) muscles from WT, mdx and LbCpf1-edited mice (mdx-C). (FIG. 5F) Immunohistochemistry of TA and G/P muscles from WT, mdx and LbCpf1-edited mice (mdx-C) using antibody to dystrophin (red). mdx muscle showed fibrosis and inflammatory infiltration, whereas mdx-C muscle showed normal muscle structure.

[0032] FIGS. 6A-C. Genome editing at DMD exon 51 by LbCpf1 or AsCpf1. (FIG. 6A) DNA sequencing of DMD exon 51 from a mixture of DMD patient (RIKEN 51) skin fibroblast-derived iPSCs edited by LbCpf1 or AsCpf1 using g1. Sequences of individual edited DMD allele are shown beneath the uncorrected DMD allele. Δ denotes nucleotide deletion. (FIG. 6B) DNA sequencing of DMD exon 51 from a single clone of DMD patient skin fibroblast-derived iPSCs edited by LbCpf1 or AsCpf1 using g1. (FIG. 6C) DNA Sequencing of PCR products of 10T1/2 cells following LbCpf1-editing with g2 or g3. WT sequence is on top and INDEL sequences are on the bottom.

[0033] FIGS. 7A-B. Histological analysis of muscles from WT, mdx and LbCpf1-edited mice (mdx-C). (FIG. 7A) Immunohistochemistry and H&E staining of whole tibialis anterior (TA) muscle. Dystrophin staining is red. (FIG. 7B) Immunohistochemistry and H&E staining of whole gastrocnemius/plantaris (G/P) muscles. Dystrophin staining is red.

### DETAILED DESCRIPTION

[0034] Duchenne muscular dystrophy, like many other diseases of genetic origin, present challenging therapeutic scenarios. The CRISPR-Cas system represents an approach for correction of diverse genetic defects. The CRISPR (clustered regularly interspaced short palindromic repeats) system functions as an adaptive immune system in bacteria and archaea that defends against phage infection. In this system, an endonuclease is guided to specific genomic sequences by a single guide RNA (sgRNA), resulting in DNA cutting near a protospacer adjacent motif (PAM) sequence. Previously, CRISPR-Cas9 was used to correct the DMD mutation in mice and human cells. However, many challenges remain to be addressed. For example, Streptococcus pyogenes Cas9 (SpCas9), currently the most widely used Cas9 endonuclease, has a G-rich PAM requirement (NGG) that excludes genome editing of AT-rich regions. Additionally, the large size of SpCas9 reduces the efficiency of packaging and delivery in low-capacity viral vectors, such as Adeno-associated virus (AAV) vectors. The Cas9 endonuclease from Staphylococcus aureus (SaCas9), although smaller in size than SpCas9, has a PAM sequence (NNGRRT) that is longer and more complex, thus limiting the range of its genomic targets (Ran et al., 2015). Smaller CRISPR enzymes with greater flexibility in recognition sequence and comparable cutting efficiency would facilitate precision gene editing, especially for translational applications.

[0035] As demonstrated by the disclosure, an RNA-guided endonuclease, named Cpf1 (CRISPR from Prevotella and Francisella 1), is effective for mammalian genome cleavage.

[0036] Cpf1 has several unique features that expand its genome editing potential when compared to Cas9: Cpf1-mediated cleavage is guided by a single and short crRNA (abbreviated as gRNA), whereas Cas9-mediated cleavage is guided by a hybrid of CRISPR RNA (crRNA) and a long trans-activating crRNA (tracrRNA). Cpf1 prefers a T-rich PAM at the 5′-end of a protospacer, while Cas9 requires a G-rich PAM at the 3′ end of the target sequence. Cpf1-mediated cleavage produces a sticky end distal to the PAM site, which activates DNA repair machinery, while Cas9 cutting generates a blunt end. Cpf1 also has RNase activity, which can process precursor crRNAs to mature crRNAs. Like Cas9, Cpf1 binds to a targeted genomic site and generates a double-stranded break (DSB), which is then repaired either by non-homologous end-joining (NHEJ) or by homology-directed repair (HDR) if an exogenous template is provided. Prior to the instant disclosure, neither had the advantages of Cpf1 over Cas9 been appreciated nor had the use of Cpf1 for correction of genetic mutations in mammalian cells and animal models of disease been demonstrated. Here, the inventors show that Cpf1 provides a robust and efficient RNA-guided genome editing system that permanently corrects DMD mutations by different strategies, thereby restoring dystrophin expression and preventing progression of the disease. These findings provide a new approach for the permanent correction of human genetic mutations. These and other aspects of the disclosure are reproduced below.

### I. DUCHENNE MUSCULAR DYSTROPHY

[0037] A. Background

[0038] Duchenne muscular dystrophy (DMD) is a recessive X-linked form of muscular dystrophy, affecting around 1 in 3,500 boys, which results in muscle degeneration and premature death. The disorder is caused by a mutation in the gene dystrophin (See GenBank Accession No. NC_000023.11), located on the human X chromosome, which codes for the protein dystrophin (GenBank Accession No. AAA53189; SEQ ID NO. 383), the sequence of which is reproduced below:

| | |
|---|---|
| 1 | mlwweevedc yeredvqkkt ftkwvnaqfs kfgkqhienl fsdlqdgrrl ldllegltgq |
| 61 | klpkekgstr vhalnnvnka lrvlqnnnvd lvnigstdiv dgnhkltlgl iwniilhwqv |
| 121 | knvmknimag lqqtnsekil lswvrqstrn ypqvnvinft tswsdglaln alihshrpdl |
| 181 | fdwnsvvcqq satqrlehaf niaryqlgie klldpedvdt typdkksilm yitslfqvlp |
| 241 | qqvsieaiqe vemlprppkv tkeehfqlhh qmhysqqitv slaqgyerts spkprfksya |
| 301 | ytqaayvtts dptrspfpsq hleapedksf gsslmesevn ldryqtalee vlswllsaed |
| 361 | tlqaqgeisn dvevvkdqfh thegymmdlt ahqgrvgnil qlgskligtg klsedeetev |
| 421 | qeqmnllnsr weclrvasme kqsnlhrvlm dlqnqklkel ndwltkteer trkmeeeplg |
| 481 | pdledlkrqv qqhkvlqedl eqeqvrvnsl thmvvvvdes sgdhataale eqlkvlgdrw |
| 541 | anicrwtedr wvllqdillk wqrlteeqcl fsawlseked avnkihttgf kdqnemlssl |
| 601 | qklavlkadl ekkkqsmgkl yslkqdllst lknksvtqkt eawldnfarc wdnlvqklek |
| 661 | staqisqavt ttqpsltqtt vmetvttvtt reqilvkhaq eelpppppqk krqitvdsei |
| 721 | rkrldvdite lhswitrsea vlqspefaif rkegnfsdlk ekvnaierek aekfrklqda |
| 781 | srsaqalveq mvnegvnads ikqaseqlns rwiefcqlls erlnwleyqn niiafynqlq |
| 841 | qleqmtttae nwlkiqpttp septaiksql kickdevnrl sglqpqierl kiqsialkek |
| 901 | gqgpmfldad fvaftnhfkq vfsdvqarek elqtifdtlp pmryqetmsa irtwvqqset |
| 961 | klsipqlsvt dyeimeqrlg elqalqsslq eqqsglyyls ttvkemskka pseisrkyqs |
| 1021 | efeeiegrwk klssqlvehc qkleeqmnkl rkiqnhiqtl kkwmaevdvf lkeewpalgd |
| 1081 | seilkkqlkq crllvsdiqt iqpslnsvne ggqkikneae pefasrlete lkelntqwdh |
| 1141 | mcqqvyarke alkgglektv slqkdlsemh ewmtqaeeey lerdfeyktp delqkaveem |
| 1201 | krakeeaqqk eakvklltes vnsviaqapp vaqealkkel etlttnyqwl ctrlngkckt |
| 1261 | leevwacwhe llsylekank wlnevefklk ttenipggae eisevldsle nlmrhsednp |
| 1321 | nqirilaqtl tdggvmdeli neeletfnsr wrelheeavr rqklleqsiq saqetekslh |
| 1381 | liqesltfid kqlaayiadk vdaaqmpqea qkiqsdltsh eisleemkkh nqgkeaaqrv |
| 1441 | lsqidvaqkk lqdvsmkfrl fqkpanfelr lqeskmilde vkmhlpalet ksveqevvqs |
| 1501 | qlnhcvnlyk slsevkseve mviktgrqiv qkkqtenpke ldervtalkl hynelgakvt |
| 1561 | erkqqlekcl klsrkmrkem nvltewlaat dmeltkrsav egmpsnldse vawgkatqke |
| 1621 | iekqkvhlks itevgealkt vlgkketlve dklsllnsnw iavtsraeew lnllleyqkh |
| 1681 | metfdqnvdh itkwiiqadt lldesekkkp qqkedvlkrl kaelndirpk vdstrdqaan |
| 1741 | lmanrgdhcr klvepqisel nhrfaaishr iktgkasipl keleqfnsdi qkllepleae |
| 1801 | iqqgvnlkee dfnkdmnedn egtvkellqr gdnlqqritd erkreeikik qqllqtkhna |
| 1861 | lkdlrsqrrk kaleishqwy qykrqaddll kclddiekkl aslpeprder kikeidrelq |
| 1921 | kkkeelnavr rqaeglsedg aamaveptqi qlskrwreie skfaqfrrln faqihtvree |
| 1981 | tmmvmtedmp leisyvpsty lteithvsqa lleveqllna pdlcakdfed lfkqeeslkn |
| 2041 | ikdslqqssg ridiihskkt aalqsatpve rvklqealsq ldfqwekvnk mykdrqgrfd |
| 2101 | rsvekwrrfh ydikifnqwl teaeqflrkt qipenwehak ykwylkelqd gigqrqtvvr |
| 2161 | tlnatgeeii qqssktdasi lqeklgslnl rwqevckqls drkkrleeqk nilsefqrdl |
| 2221 | nefvlwleea dniasiplep gkeqqlkekl eqvkllveel plrqgilkql netggpvlvs |
| 2281 | apispeeqdk lenklkqtnl qwikvsralp ekqgeieaqi kdlgqlekkl edleeqlnhl |
| 2341 | llwlspirnq leiynqpnqe gpfdvqetei avqakqpdve eilskgqhly kekpatqpvk |
| 2401 | rkledlssew kavnrllqel rakqpdlapg lttigasptq tvtlvtqpvv tketaiskle |
| 2461 | mpsslmlevp aladfnrawt eltdwlslld qviksqrvmv gdledinemi ikqkatmqdl |
| 2521 | eqrrpqleel itaaqnlknk tsnqeartii tdrieriqnq wdevqehlqn rrqqlnemlk |
| 2581 | dstqwleake eaeqvlgqar akleswkegp ytvdaiqkki tetkqlakdl rqwqtnvdva |
| 2641 | ndlalkllrd ysaddtrkvh miteninasw rsihkrvser eaaleethrl lqqfpldlek |
| 2701 | flawlteaet tanvlqdatr kerlledskg vkelmkqwqd lqgeieahtd vyhnldensq |
| 2761 | kilrslegsd davllqrrld nmnfkwselr kkslnirshl eassdqwkrl hlslqellvw |
| 2821 | lqlkddelsr qapiggdfpa vqkqndvhra fkrelktkep vimstletvr iflteqpleg |
| 2881 | leklyqepre lppeeraqnv trllrkqaee vnteweklnl hsadwqrkid etlerlqelq |
| 2941 | eatdeldlkl rqaevikgsw qpvgdllids lqdhlekvka lrgeiaplke nvshvndlar |
| 3001 | qlttlgiqls pynlstledl ntrwkllqva vedrvrqlhe ahrdfgpasq hflstsvqgp |
| 3061 | weraispnkv pyyinhetqt tcwdhpkmte lyqsladlnn vrfsayrtam klrrlqkalc |
| 3121 | ldllslsaac daldqhnlkq ndqpmdilqi inclttiydr leqehnnlvn vplcvdmcln |
| 3181 | wllnvydtgr tgrirvlsfk tgiislckah ledkyrylfk qvasstgfcd qrrlglllhd |
| 3241 | siqiprqlge vasfggsnie psvrscfqfa nnkpeieaal fldwmrlepq smvwlpvlhr |
| 3301 | vaaaetakhq akcnickecp iigfryrslk hfnydicqsc ffsgrvakgh kmhypmveyc |
| 3361 | tpttsgedvr dfakvlknkf rtkryfakhp rmgylpvqtv legdnmetpv tlinfwpvds |
| 3421 | apasspqlsh ddthsriehy asrlaemens ngsylndsis pnesiddehl liqhycqsln |
| 3481 | qdsplsqprs paqilisles eergeleril adleeenrnl qaeydrlkqq hehkglsplp |
| 3541 | sppemmptsp qsprdaelia eakllrqhkg rlearmqile dhnkqlesql hrlrqlleqp |
| 3601 | qaeakvngtt vsspstslqr sdssqpmllr vvgsqtsdsm geedllsppq dtstgleevm |
| 3661 | eqlnnsfpss rgrntpgkpm redtm |

[0039] In humans, dystrophin mRNA contains 79 exons. Dystrophin mRNA is known to be alternatively spliced, resulting in various isoforms. Exemplary dystrophin isoforms are listed in Table 1.

[0040] In humans, dystrophin mRNA contains 79 exons. Dystrophin mRNA is known to be alternatively spliced, resulting in various isoforms of the protein. Exemplary dystrophin isoforms are listed in Table 1.

TABLE 1
Dystrophin isoforms

| | | Nucleic | | | |
|---|---|---|---|---|---|
| | | Acid | | Protein | |
| Sequence | Nucleic Acid | SEQ ID | Protein Accession | SEQ ID | |
| Name* | Accession No.* | NO: | No.* | NO: | Description |
| DMD Genomic | NC_000023.11 | None | None | None | Sequence from Human |
| Sequence | (positions | | | | X Chromosome (at |
| | 31119219 to | | | | positions Xp21.2 to |
| | 33339609) | | | | p21.1) from Assembly |
| | | | | | GRCh38.p7 |
| | | | | | (GCF_000001405.33) |
| Dystrophin | NM_000109.3 | 384 | NP_000100.2 | 385 | Transcript Variant: |
| Dp427c isoform | | | | | transcript Dp427c is |
| | | | | | expressed |
| | | | | | predominantly in |
| | | | | | neurons of the cortex |
| | | | | | and the CA regions of |
| | | | | | the hippocampus. It |
| | | | | | uses a unique |
| | | | | | promoter/exon 1 |
| | | | | | located about 130 kb |
| | | | | | upstream of the |
| | | | | | Dp427m transcript |
| | | | | | promoter. The |
| | | | | | transcript includes the |
| | | | | | common exon 2 of |
| | | | | | transcript Dp427m and |
| | | | | | has a similar length of |
| | | | | | 14 kb. The Dp427c |
| | | | | | isoform contains a |
| | | | | | unique N-terminal |
| | | | | | MED sequence, instead |
| | | | | | of the |
| | | | | | MLWWEEVEDCY |
| | | | | | (SEQ ID NO: 3) |
| | | | | | sequence of isoform |
| | | | | | Dp427m. The |
| | | | | | remainder of isoform |
| | | | | | Dp427c is identical to |
| | | | | | isoform Dp427m. |
| Dystrophin | NM_004006.2 | 386 | NP_003997.1 | 387 | Transcript Variant: |
| Dp427m | | | | | transcript Dp427m |
| isoform | | | | | encodes the main |
| | | | | | dystrophin protein |
| | | | | | found in muscle. As a |
| | | | | | result of alternative |
| | | | | | promoter use, exon 1 |
| | | | | | encodes a unique N- |
| | | | | | terminal |
| | | | | | MLWWEEVEDCY |
| | | | | | (SEQ ID NO: 3) aa |
| | | | | | sequence. |
| Dystrophin | NM_004009.3 | 388 | NP_004000.1 | 389 | Transcript Variant: |
| Dp427p1 | | | | | transcript Dp427p1 |
| isoform | | | | | initiates from a unique |
| | | | | | promoter/exon 1 |
| | | | | | located in what |
| | | | | | corresponds to the first |
| | | | | | intron of transcript |
| | | | | | Dp427m. The transcript |
| | | | | | adds the common exon |
| | | | | | 2 of Dp427m and has a |
| | | | | | similar length (14 kb). |
| | | | | | The Dp427p1 isoform |
| | | | | | replaces the |
| | | | | | MLWWEEVEDCY |
| | | | | | (SEQ ID NO: 3)-start |
| | | | | | of Dp427m with a |
| | | | | | unique N-terminal |
| | | | | | MSEVSSD (SEQ ID |
| | | | | | NO: 8) aa sequence. |
| Dystrophin | NM_004011.3 | 390 | NP_004002.2 | 391 | Transcript Variant: |
| Dp260-1 | | | | | transcript Dp260-1 uses |
| isoform | | | | | exons 30-79, and |
| | | | | | originates from a |
| | | | | | promoter/exon 1 |
| | | | | | sequence located in |
| | | | | | intron 29 of the |
| | | | | | dystrophin gene. As a |
| | | | | | result, Dp260-1 |
| | | | | | contains a 95 bp exon 1 |
| | | | | | encoding a unique N- |
| | | | | | terminal 16 aa |
| | | | | | MTEIILLIFFPAYFLN- |
| | | | | | sequence that replaces |
| | | | | | amino acids 1-1357 of |
| | | | | | the full-length |
| | | | | | dystrophin product |
| | | | | | (Dp427m isoform). |
| Dystrophin | NM_004012.3 | 392 | NP_004003.1 | 393 | Transcript Variant: |
| Dp260-2 | | | | | transcript Dp260-2 uses |
| isoform | | | | | exons 30-79, starting |
| | | | | | from a promoter/exon 1 |
| | | | | | sequence located in |
| | | | | | intron 29 of the |
| | | | | | dystrophin gene that is |
| | | | | | alternatively spliced |
| | | | | | and lacks N-terminal |
| | | | | | amino acids 1-1357 of |
| | | | | | the full length |
| | | | | | dystrophin (Dp427m |
| | | | | | isoform). The Dp260-2 |
| | | | | | transcript encodes a |
| | | | | | unique N-terminal |
| | | | | | MSARKLRNLSYKK |
| | | | | | sequence. |
| Dystrophin | NM_004013.2 | 394 | NP_004004.1 | 395 | Transcript Variant: |
| Dp140 isoform | | | | | Dp140 transcripts use |
| | | | | | exons 45-79, starting at |
| | | | | | a promoter/exon 1 |
| | | | | | located in intron 44. |
| | | | | | Dp140 transcripts have |
| | | | | | a long (1 kb) 5′ UTR |
| | | | | | since translation is |
| | | | | | initiated in exon 51 |
| | | | | | (corresponding to aa |
| | | | | | 2461 of dystrophin). In |
| | | | | | addition to the |
| | | | | | alternative promoter |
| | | | | | and exon 1, differential |
| | | | | | splicing of exons 71-74 |
| | | | | | and 78 produces at least |
| | | | | | five Dp140 isoforms. |
| | | | | | Of these, this transcript |
| | | | | | (Dp140) contains all of |
| | | | | | the exons. |
| Dystrophin | NM_004014.2 | 396 | NP_004005.1 | 397 | Transcript Variant: |
| Dp116 isoform | | | | | transcript Dp116 uses |
| | | | | | exons 56-79, starting |
| | | | | | from a promoter/exon 1 |
| | | | | | within intron 55. As a |
| | | | | | result, the Dp116 |
| | | | | | isoform contains a |
| | | | | | unique N-terminal |
| | | | | | MLHRKTYHVK aa |
| | | | | | sequence, instead of aa |
| | | | | | 1-2739 of dystrophin. |
| | | | | | Differential splicing |
| | | | | | produces several |
| | | | | | Dp116-subtypes. The |
| | | | | | Dp116 isoform is also |
| | | | | | known as S-dystrophin |
| | | | | | or apo-dystrophin-2. |
| Dystrophin | NM_004015.2 | 398 | NP_004006.1 | 399 | Transcript Variant: |
| Dp71 isoform | | | | | Dp71 transcripts use |
| | | | | | exons 63-79 with a |
| | | | | | novel 80- to 100-nt |
| | | | | | exon containing an |
| | | | | | ATG start site for a |
| | | | | | new coding sequence of |
| | | | | | 17 nt. The short coding |
| | | | | | sequence is in-frame |
| | | | | | with the consecutive |
| | | | | | dystrophin sequence |
| | | | | | from exon 63. |
| | | | | | Differential splicing of |
| | | | | | exons 71 and 78 |
| | | | | | produces at least four |
| | | | | | Dp71 isoforms. Of |
| | | | | | these, this transcript |
| | | | | | (Dp71) includes both |
| | | | | | exons 71 and 78. |
| Dystrophin | NM_004016.2 | 400 | NP_004007.1 | 401 | Transcript Variant: |
| Dp71b isoform | | | | | Dp71 transcripts use |
| | | | | | exons 63-79 with a |
| | | | | | novel 80- to 100-nt |
| | | | | | exon containing an |
| | | | | | ATG start site for a |
| | | | | | new coding sequence of |
| | | | | | 17 nt. The short coding |
| | | | | | sequence is in-frame |
| | | | | | with the consecutive |
| | | | | | dystrophin sequence |
| | | | | | from exon 63. |
| | | | | | Differential splicing of |
| | | | | | exons 71 and 78 |
| | | | | | produces at least four |
| | | | | | Dp71 isoforms. Of |
| | | | | | these, this transcript |
| | | | | | (Dp71b) lacks exon 78 |
| | | | | | and encodes a protein |
| | | | | | with a different C- |
| | | | | | terminus than Dp71 and |
| | | | | | Dp71a isoforms. |
| Dystrophin | NM_004017.2 | 402 | NP_004008.1 | 403 | Transcript Variant: |
| Dp71a isoform | | | | | Dp71 transcripts use |
| | | | | | exons 63-79 with a |
| | | | | | novel 80- to 100-nt |
| | | | | | exon containing an |
| | | | | | ATG start site for a |
| | | | | | new coding sequence of |
| | | | | | 17 nt. The short coding |
| | | | | | sequence is in-frame |
| | | | | | with the consecutive |
| | | | | | dystrophin sequence |
| | | | | | from exon 63. |
| | | | | | Differential splicing of |
| | | | | | exons 71 and 78 |
| | | | | | produces at least four |
| | | | | | Dp71 isoforms. Of |
| | | | | | these, this transcript |
| | | | | | (Dp71a) lacks exon 71. |
| Dystrophin | NM_004018.2 | 404 | NP_004009.1 | 405 | Transcript Variant: |
| Dp71ab isoform | | | | | Dp71 transcripts use |
| | | | | | exons 63-79 with a |
| | | | | | novel 80- to 100-nt |
| | | | | | exon containing an |
| | | | | | ATG start site for a |
| | | | | | new coding sequence of |
| | | | | | 17 nt. The short coding |
| | | | | | sequence is in-frame |
| | | | | | with the consecutive |
| | | | | | dystrophin sequence |
| | | | | | from exon 63. |
| | | | | | Differential splicing of |
| | | | | | exons 71 and 78 |
| | | | | | produces at least four |
| | | | | | Dp71 isoforms. Of |
| | | | | | these, this transcript |
| | | | | | (Dp71ab) lacks both |
| | | | | | exons 71 and 78 and |
| | | | | | encodes a protein with |
| | | | | | a C-terminus like |
| | | | | | isoform Dp71b. |
| Dystrophin | NM_004019.2 | 406 | NP_004010.1 | 407 | Transcript Variant: |
| Dp40 isoform | | | | | transcript Dp40 uses |
| | | | | | exons 63-70. The 5′ |
| | | | | | UTR and encoded first |
| | | | | | 7 aa are identical to that |
| | | | | | in transcript Dp71, but |
| | | | | | the stop codon lies at |
| | | | | | the splice junction of |
| | | | | | the exon/intron 70. The |
| | | | | | 3′ UTR includes nt |
| | | | | | from intron 70 which |
| | | | | | includes an alternative |
| | | | | | polyadenylation site. |
| | | | | | The Dp40 isoform |
| | | | | | lacks the normal C- |
| | | | | | terminal end of full- |
| | | | | | length dystrophin (aa |
| | | | | | 3409-3685). |
| Dystrophin | NM_004020.3 | 408 | NP_004011.2 | 409 | Transcript Variant: |
| Dp140c isoform | | | | | Dp140 transcripts use |
| | | | | | exons 45-79, starting at |
| | | | | | a promoter/exon 1 |
| | | | | | located in intron 44. |
| | | | | | Dp140 transcripts have |
| | | | | | a long (1 kb) 5′ UTR |
| | | | | | since translation is |
| | | | | | initiated in exon 51 |
| | | | | | (corresponding to aa |
| | | | | | 2461 of dystrophin). In |
| | | | | | addition to the |
| | | | | | alternative promoter |
| | | | | | and exon 1, differential |
| | | | | | splicing of exons 71-74 |
| | | | | | and 78 produces at least |
| | | | | | five Dp140 isoforms. |
| | | | | | Of these, this transcript |
| | | | | | (Dp140c) lacks exons |
| | | | | | 71-74. |
| Dystrophin | NM_004021.2 | 410 | NP_004012.1 | 411 | Transcript Variant: |
| Dp140b | | | | | Dp140 transcripts use |
| isoform | | | | | exons 45-79, starting at |
| | | | | | a promoter/exon 1 |
| | | | | | located in intron 44. |
| | | | | | Dp140 transcripts have |
| | | | | | a long (1 kb) 5′ UTR |
| | | | | | since translation is |
| | | | | | initiated in exon 51 |
| | | | | | (corresponding to aa |
| | | | | | 2461 of dystrophin). In |
| | | | | | addition to the |
| | | | | | alternative promoter |
| | | | | | and exon 1, differential |
| | | | | | splicing of exons 71-74 |
| | | | | | and 78 produces at least |
| | | | | | five Dp140 isoforms. |
| | | | | | Of these, this transcript |
| | | | | | (Dp140b) lacks exon 78 |
| | | | | | and encodes a protein |
| | | | | | with a unique C- |
| | | | | | terminus. |
| Dystrophin | NM_004022.2 | 412 | NP_004013.1 | 413 | Transcript Variant: |
| Dp140ab | | | | | Dp140 transcripts use |
| isoform | | | | | exons 45-79, starting at |
| | | | | | a promoter/exon 1 |
| | | | | | located in intron 44. |
| | | | | | Dp140 transcripts have |
| | | | | | a long (1 kb) 5′ UTR |
| | | | | | since translation is |
| | | | | | initiated in exon 51 |
| | | | | | (corresponding to aa |
| | | | | | 2461 of dystrophin). In |
| | | | | | addition to the |
| | | | | | alternative promoter |
| | | | | | and exon 1, differential |
| | | | | | splicing of exons 71-74 |
| | | | | | and 78 produces at least |
| | | | | | five Dp140 isoforms. |
| | | | | | Of these, this transcript |
| | | | | | (Dp140ab) lacks exons |
| | | | | | 71 and 78 and encodes |
| | | | | | a protein with a unique |
| | | | | | C-terminus. |
| Dystrophin | NM_004023.2 | 414 | NP_004014.1 | 415 | Transcript Variant: |
| Dp140bc | | | | | Dp140 transcripts use |
| isoform | | | | | exons 45-79, starting at |
| | | | | | a promoter/exon 1 |
| | | | | | located in intron 44. |
| | | | | | Dp140 transcripts have |
| | | | | | a long (1 kb) 5′ UTR |
| | | | | | since translation is |
| | | | | | initiated in exon 51 |
| | | | | | (corresponding to aa |
| | | | | | 2461 of dystrophin). In |
| | | | | | addition to the |
| | | | | | alternative promoter |
| | | | | | and exon 1, differential |
| | | | | | splicing of exons 71-74 |
| | | | | | and 78 produces at least |
| | | | | | five Dp140 isoforms. |
| | | | | | Of these, this transcript |
| | | | | | (Dp140bc) lacks exons |
| | | | | | 71-74 and 78 and |
| | | | | | encodes a protein with |
| | | | | | a unique C-terminus. |
| Dystrophin | XM_006724469.3 | 416 | XP_006724532.1 | 417 | |
| isoform X2 | | | | | |
| Dystrophin | XM_011545467.1 | 418 | XP_011543769.1 | 419 | |
| isoform X5 | | | | | |
| Dystrophin | XM_006724473.2 | 420 | XP_006724536.1 | 421 | |
| isoform X6 | | | | | |
| Dystrophin | XM_006724475.2 | 422 | XP_006724538.1 | 423 | |
| isoform X8 | | | | | |
| Dystrophin | XM_017029328.1 | 424 | XP_016884817.1 | 425 | |
| isoform X4 | | | | | |
| Dystrophin | XM_006724468.2 | 426 | XP_006724531.1 | 427 | |
| isoform X1 | | | | | |
| Dystrophin | XM_017029331.1 | 428 | XP_016884820.1 | 429 | |
| isoform X13 | | | | | |
| Dystrophin | XM_006724470.3 | 430 | XP_006724533.1 | 431 | |
| isoform X3 | | | | | |
| Dystrophin | XM_006724474.3 | 432 | XP_006724537.1 | 433 | |
| isoform X7 | | | | | |
| Dystrophin | XM_011545468.2 | 434 | XP_011543770.1 | 435 | |
| isoform X9 | | | | | |
| Dystrophin | XM_017029330.1 | 436 | XP_016884819.1 | 437 | |
| isoform X11 | | | | | |
| Dystrophin | XM_017029329.1 | 438 | XP_016884818.1 | 439 | |
| isoform X10 | | | | | |
| Dystrophin | XM_011545469.1 | 440 | XP_011543771.1 | 441 | |
| isoform X12 | | | | | |

[0041] Dystrophin is an important component within muscle tissue that provides structural stability to the dystroglycan complex (DGC) of the cell membrane. While both sexes can carry the mutation, females are rarely affected with the skeletal muscle form of the disease.

[0042] B. Symptoms

[0043] Symptoms usually appear in boys between the ages of 2 and 3 and may be visible in early infancy. Even though symptoms do not appear until early infancy, laboratory testing can identify children who carry the active mutation at birth. Progressive proximal muscle weakness of the legs and pelvis associated with loss of muscle mass is observed first. Eventually this weakness spreads to the arms, neck, and other areas. Early signs may include pseudohypertrophy (enlargement of calf and deltoid muscles), low endurance, and difficulties in standing unaided or inability to ascend staircases. As the condition progresses, muscle tissue experiences wasting and is eventually replaced by fat and fibrotic tissue (fibrosis). By age 10, braces may be required to aid in walking but most patients are wheelchair dependent by age 12. Later symptoms may include abnormal bone development that lead to skeletal deformities, including curvature of the spine. Due to progressive deterioration of muscle, loss of movement occurs, eventually leading to paralysis. Intellectual impairment may or may not be present but if present, does not progressively worsen as the child ages. The average life expectancy for males afflicted with DMD is around 25.

[0044] The main symptom of Duchenne muscular dystrophy, a progressive neuromuscular disorder, is muscle weakness associated with muscle wasting with the voluntary muscles being first affected, especially those of the hips, pelvic area, thighs, shoulders, and calves. Muscle weakness also occurs later, in the arms, neck, and other areas. Calves are often enlarged. Symptoms usually appear before age 6 and may appear in early infancy. Other physical symptoms are:
[0045] Awkward manner of walking, stepping, or running—(patients tend to walk on their forefeet, because of an increased calf muscle tone. Also, toe walking is a compensatory adaptation to knee extensor weakness.)
[0046] Frequent falls
[0047] Fatigue
[0048] Difficulty with motor skills (running, hopping, jumping)
[0049] Lumbar hyperlordosis, possibly leading to shortening of the hip-flexor muscles. This has an effect on overall posture and a manner of walking, stepping, or running.
[0050] Muscle contractures of Achilles tendon and hamstrings impair functionality because the muscle fibers shorten and fibrose in connective tissue
[0051] Progressive difficulty walking
[0052] Muscle fiber deformities
[0053] Pseudohypertrophy (enlarging) of tongue and calf muscles. The muscle tissue is eventually replaced by fat and connective tissue, hence the term pseudohypertrophy.
[0054] Higher risk of neurobehavioral disorders (e.g., ADHD), learning disorders (dyslexia), and non-progressive weaknesses in specific cognitive skills (in particular short-term verbal memory), which are believed to be the result of absent or dysfunctional dystrophin in the brain
[0055] Eventual loss of ability to walk (usually by the age of 12)
[0056] Skeletal deformities (including scoliosis in some cases)
[0057] Trouble getting up from lying or sitting position

[0058] The condition can often be observed clinically from the moment the patient takes his first steps, and the ability to walk usually completely disintegrates between the time the boy is 9 to 12 years of age. Most men affected with DMD become essentially “paralyzed from the neck down” by the age of 21. Muscle wasting begins in the legs and pelvis, then progresses to the muscles of the shoulders and neck, followed by loss of arm muscles and respiratory muscles. Calf muscle enlargement (pseudohypertrophy) is quite obvious. Cardiomyopathy particularly (dilated cardiomyopathy) is common, but the development of congestive heart failure or arrhythmia (irregular heartbeat) is only occasional.

[0059] A positive Gowers' sign reflects the more severe impairment of the lower extremities muscles. The child helps himself to get up with upper extremities: first by rising to stand on his arms and knees, and then “walking” his hands up his legs to stand upright. Affected children usually tire more easily and have less overall strength than their peers. Creatine kinase (CPK-MM) levels in the bloodstream are extremely high. An electromyography (EMG) shows that weakness is caused by destruction of muscle tissue rather than by damage to nerves. Genetic testing can reveal genetic errors in the Xp21 gene. A muscle biopsy (immunohistochemistry or immunoblotting) or genetic test (blood test) confirms the absence of dystrophin, although improvements in genetic testing often make this unnecessary.
[0060] Abnormal heart muscle (cardiomyopathy)
[0061] Congestive heart failure or irregular heart rhythm (arrhythmia)
[0062] Deformities of the chest and back (scoliosis)
[0063] Enlarged muscles of the calves, buttocks, and shoulders (around age 4 or 5). These muscles are eventually replaced by fat and connective tissue (pseudohypertrophy).
[0064] Loss of muscle mass (atrophy)
[0065] Muscle contractures in the heels, legs
[0066] Muscle deformities
[0067] Respiratory disorders, including pneumonia and swallowing with food or fluid passing into the lungs (in late stages of the disease)

[0068] C. Causes

[0069] Duchenne muscular dystrophy (DMD) is caused by a mutation of the dystrophin gene at locus Xp21, located on the short arm of the X chromosome. Dystrophin is responsible for connecting the cytoskeleton of each muscle fiber to the underlying basal lamina (extracellular matrix), through a protein complex containing many subunits. The absence of dystrophin permits excess calcium to penetrate the sarcolemma (the cell membrane). Alterations in calcium and signaling pathways cause water to enter into the mitochondria, which then burst.

[0070] In skeletal muscle dystrophy, mitochondrial dysfunction gives rise to an amplification of stress-induced cytosolic calcium signals and an amplification of stress-induced reactive-oxygen species (ROS) production. In a complex cascading process that involves several pathways and is not clearly understood, increased oxidative stress within the cell damages the sarcolemma and eventually results in the death of the cell. Muscle fibers undergo necrosis and are ultimately replaced with adipose and connective tissue.

[0071] DMD is inherited in an X-linked recessive pattern. Females will typically be carriers for the disease while males will be affected. Typically, a female carrier will be unaware they carry a mutation until they have an affected son. The son of a carrier mother has a 50% chance of inheriting the defective gene from his mother. The daughter of a carrier mother has a 50% chance of being a carrier and a 50% chance of having two normal copies of the gene. In all cases, an unaffected father will either pass a normal Y to his son or a normal X to his daughter. Female carriers of an X-linked recessive condition, such as DMD, can show symptoms depending on their pattern of X-inactivation.

[0072] Exon deletions preceding exon 51 of the human DMD gene, which disrupt the open reading frame (ORF) by juxtaposing out of frame exons, represent the most common type of human DMD mutation. Skipping of exon 51 can, in principle, restore the DMD ORF in 13% of DMD patients with exon deletions.

[0073] Duchenne muscular dystrophy has an incidence of 1 in 3,500 male infants. Mutations within the dystrophin gene can either be inherited or occur spontaneously during germline transmission.

[0074] D. Diagnosis

[0075] Genetic counseling is advised for people with a family history of the disorder. Duchenne muscular dystrophy can be detected with about 95% accuracy by genetic studies performed during pregnancy.

[0076] DNA Test.

[0077] The muscle-specific isoform of the dystrophin gene is composed of 79 exons, and DNA testing and analysis can usually identify the specific type of mutation of the exon or exons that are affected. DNA testing confirms the diagnosis in most cases.

[0078] Muscle Biopsy.

[0079] If DNA testing fails to find the mutation, a muscle biopsy test may be performed. A small sample of muscle tissue is extracted (usually with a scalpel instead of a needle) and a dye is applied that reveals the presence of dystrophin. Complete absence of the protein indicates the condition.

[0080] Over the past several years DNA tests have been developed that detect more of the many mutations that cause the condition, and muscle biopsy is not required as often to confirm the presence of Duchenne's.

[0081] Prenatal Tests.

[0082] DMD is carried by an X-linked recessive gene. Males have only one X chromosome, so one copy of the mutated gene will cause DMD. Fathers cannot pass X-linked traits on to their sons, so the mutation is transmitted by the mother.

[0083] If the mother is a carrier, and therefore one of her two X chromosomes has a DMD mutation, there is a 50% chance that a female child will inherit that mutation as one of her two X chromosomes, and be a carrier. There is a 50% chance that a male child will inherit that mutation as his one X chromosome, and therefore have DMD.

[0084] Prenatal tests can tell whether their unborn child has the most common mutations.

[0085] There are many mutations responsible for DMD, and some have not been identified, so genetic testing only works when family members with DMD have a mutation that has been identified.

[0086] Prior to invasive testing, determination of the fetal sex is important; while males are sometimes affected by this X-linked disease, female DMD is extremely rare. This can be achieved by ultrasound scan at 16 weeks or more recently by free fetal DNA testing. Chorion villus sampling (CVS) can be done at 11-14 weeks, and has a 1% risk of miscarriage. Amniocentesis can be done after 15 weeks, and has a 0.5% risk of miscarriage. Fetal blood sampling can be done at about 18 weeks. Another option in the case of unclear genetic test results is fetal muscle biopsy.

[0087] E. Treatment

[0088] There is no current cure for DMD, and an ongoing medical need has been recognized by regulatory authorities. Phase 1-2a trials with exon skipping treatment for certain mutations have halted decline and produced small clinical improvements in walking. Treatment is generally aimed at controlling the onset of symptoms to maximize the quality of life, and include the following:
[0089] Corticosteroids such as prednisolone and deflazacort increase energy and strength and defer severity of some symptoms.
[0090] Randomized control trials have shown that beta-2-agonists increase muscle strength but do not modify disease progression. Follow-up time for most RCTs on beta2-agonists is only around 12 months and hence results cannot be extrapolated beyond that time frame.
[0091] Mild, non-jarring physical activity such as swimming is encouraged. Inactivity (such as bed rest) can worsen the muscle disease.
[0092] Physical therapy is helpful to maintain muscle strength, flexibility, and function.
[0093] Orthopedic appliances (such as braces and wheelchairs) may improve mobility and the ability for self-care. Form-fitting removable leg braces that hold the ankle in place during sleep can defer the onset of contractures.
[0094] Appropriate respiratory support as the disease progresses is important.
   Comprehensive multi-disciplinary care standards/guidelines for DMD have been developed by the Centers for Disease Control and Prevention (CDC), and are available at www.treat-nmd.eu/dmd/care/diagnosis-management-DMD.

[0095] DMD generally progresses through five stages, as outlined in Bushby et al., Lancet Neurol., 9(1): 77-93 (2010) and Bushby et al., Lancet Neurol., 9(2): 177-198 (2010), incorporated by reference in their entireties. During the presymptomatic stage, patients typically show developmental delay, but no gait disturbance. During the early ambulatory stage, patients typically show the Gowers' sign, waddling gait, and toe walking. During the late ambulatory stage, patients typically exhibit an increasingly labored gait and begin to lose the ability to climb stairs and rise from the floor. During the early non-ambulatory stage, patients are typically able to self-propel for some time, are able to maintain posture, and may develop scoliosis. During the late non-ambulatory stage, upper limb function and postural maintenance is increasingly limited.

[0096] In some embodiments, treatment is initiated in the presymptomatic stage of the disease. In some embodiments, treatment is initiated in the early ambulatory stage. In some embodiments, treatment is initiated in the late ambulatory stage. In embodiments, treatment is initiated during the early non-ambulatory stage. In embodiments, treatment is initiated during the late non-ambulatory stage.

[0097] 1. Physical Therapy

[0098] Physical therapists are concerned with enabling patients to reach their maximum physical potential. Their aim is to:
[0099] minimize the development of contractures and deformity by developing a program of stretches and exercises where appropriate
[0100] anticipate and minimize other secondary complications of a physical nature by recommending bracing and durable medical equipment
[0101] monitor respiratory function and advise on techniques to assist with breathing exercises and methods of clearing secretions

[0102] 2. Respiration Assistance

[0103] Modern “volume ventilators/respirators,” which deliver an adjustable volume (amount) of air to the person with each breath, are valuable in the treatment of people with muscular dystrophy related respiratory problems. The ventilator may require an invasive endotracheal or tracheotomy tube through which air is directly delivered, but, for some people non-invasive delivery through a face mask or mouthpiece is sufficient. Positive airway pressure machines, particularly bi-level ones, are sometimes used in this latter way. The respiratory equipment may easily fit on a ventilator tray on the bottom or back of a power wheelchair with an external battery for portability.

[0104] Ventilator treatment may start in the mid to late teens when the respiratory muscles can begin to collapse. If the vital capacity has dropped below 40% of normal, a volume ventilator/respirator may be used during sleeping hours, a time when the person is most likely to be under ventilating (“hypoventilating”). Hypoventilation during sleep is determined by a thorough history of sleep disorder with an oximetry study and a capillary blood gas (See Pulmonary Function Testing). A cough assist device can help with excess mucus in lungs by hyperinflation of the lungs with positive air pressure, then negative pressure to get the mucus up. If the vital capacity continues to decline to less than 30 percent of normal, a volume ventilator/respirator may also be needed during the day for more assistance. The person gradually will increase the amount of time using the ventilator/respirator during the day as needed.

[0105] F. Prognosis

[0106] Duchenne muscular dystrophy is a progressive disease which eventually affects all voluntary muscles and involves the heart and breathing muscles in later stages. The life expectancy is currently estimated to be around 25, but this varies from patient to patient. Recent advancements in medicine are extending the lives of those afflicted. The Muscular Dystrophy Campaign, which is a leading UK charity focusing on all muscle disease, states that “with high standards of medical care young men with Duchenne muscular dystrophy are often living well into their 30s.”

[0107] In rare cases, persons with DMD have been seen to survive into the forties or early fifties, with the use of proper positioning in wheelchairs and beds, ventilator support (via tracheostomy or mouthpiece), airway clearance, and heart medications, if required. Early planning of the required supports for later-life care has shown greater longevity in people living with DMD.

[0108] Curiously, in the mdx mouse model of Duchenne muscular dystrophy, the lack of dystrophin is associated with increased calcium levels and skeletal muscle myonecrosis. The intrinsic laryngeal muscles (ILM) are protected and do not undergo myonecrosis. ILM have a calcium regulation system profile suggestive of a better ability to handle calcium changes in comparison to other muscles, and this may provide a mechanistic insight for their unique pathophysiological properties. The ILM may facilitate the development of novel strategies for the prevention and treatment of muscle wasting in a variety of clinical scenarios.

### II. CRISPR SYSTEMS

[0109] A. CRISPRs

[0110] CRISPRs (clustered regularly interspaced short palindromic repeats) are DNA loci containing short repetitions of base sequences. Each repetition is followed by short segments of “spacer DNA” from previous exposures to a virus. CRISPRs are found in approximately 40% of sequenced eubacteria genomes and 90% of sequenced archaea. CRISPRs are often associated with cas genes that code for proteins related to CRISPRs. The CRISPR/Cas system is a prokaryotic immune system that confers resistance to foreign genetic elements such as plasmids and phages and provides a form of acquired immunity. CRISPR spacers recognize and silence these exogenous genetic elements like RNAi in eukaryotic organisms.

[0111] CRISPR repeats range in size from 24 to 48 base pairs. They usually show some dyad symmetry, implying the formation of a secondary structure such as a hairpin, but are not truly palindromic. Repeats are separated by spacers of similar length. Some CRISPR spacer sequences exactly match sequences from plasmids and phages, although some spacers match the prokaryote's genome (self-targeting spacers). New spacers can be added rapidly in response to phage infection.

[0112] B. Cas Nucleases

[0113] CRISPR-associated (cas) genes are often associated with CRISPR repeat-spacer arrays. As of 2013, more than forty different Cas protein families had been described. Of these protein families, Cas1 appears to be ubiquitous among different CRISPR/Cas systems. Particular combinations of cas genes and repeat structures have been used to define 8 CRISPR subtypes (Ecoli, Ypest, Nmeni, Dvulg, Tneap, Hmari, Apern, and Mtube), some of which are associated with an additional gene module encoding repeat-associated mysterious proteins (RAMPs). More than one CRISPR subtype may occur in a single genome. The sporadic distribution of the CRISPR/Cas subtypes suggests that the system is subject to horizontal gene transfer during microbial evolution.

[0114] Exogenous DNA is apparently processed by proteins encoded by Cas genes into small elements (˜30 base pairs in length), which are then somehow inserted into the CRISPR locus near the leader sequence. RNAs from the CRISPR loci are constitutively expressed and are processed by Cas proteins to small RNAs composed of individual, exogenously-derived sequence elements with a flanking repeat sequence. The RNAs guide other Cas proteins to silence exogenous genetic elements at the RNA or DNA level. Evidence suggests functional diversity among CRISPR subtypes. The Cse (Cas subtype E. coli) proteins (called CasA-E in E. coli) form a functional complex, Cascade, that processes CRISPR RNA transcripts into spacer-repeat units that Cascade retains. In other prokaryotes, Cas6 processes the CRISPR transcripts. Interestingly, CRISPR-based phage inactivation in E. coli requires Cascade and Cas3, but not Cas1 and Cas2. The Cmr (Cas RAMP module) proteins found in Pyrococcus furiosus and other prokaryotes form a functional complex with small CRISPR RNAs that recognizes and cleaves complementary target RNAs. RNA-guided CRISPR enzymes are classified as type V restriction enzymes.

[0115] Cas9 is a nuclease, an enzyme specialized for cutting DNA, with two active cutting sites, one for each strand of the double helix. The team demonstrated that they could disable one or both sites while preserving Cas9's ability to locate its target DNA. combined tracrRNA and spacer RNA into a “single-guide RNA” molecule that, mixed with Cas9, could find and cut the correct DNA targets proposed that such synthetic guide RNAs might be able to be used for gene editing.

[0116] Cas9 proteins are highly enriched in pathogenic and commensal bacteria. CRISPR/Cas-mediated gene regulation may contribute to the regulation of endogenous bacterial genes, particularly during bacterial interaction with eukaryotic hosts. For example, Cas protein Cas9 of Francisella novicida uses a unique, small, CRISPR/Cas-associated RNA (scaRNA) to repress an endogenous transcript encoding a bacterial lipoprotein that is critical for F. novicida to dampen host response and promote virulence. Wang et al. showed that coinjection of Cas9 mRNA and sgRNAs into the germline (zygotes) generated nice with mutations. Delivery of Cas9 DNA sequences also is contemplated.

[0117] The systems CRISPR/Cas are separated into three classes. Class 1 uses several Cas proteins together with the CRISPR RNAs (crRNA) to build a functional endonuclease. Class 2 CRISPR systems use a single Cas protein with a crRNA. Cpf1 has been recently identified as a Class II, Type V CRISPR/Cas systems containing a 1,300 amino acid protein. See also U.S. Patent Publication 2014/0068797, which is incorporated by reference in its entirety.

[0118] C. Cpf1 Nucleases

[0119] Clustered Regularly Interspaced Short Palindromic Repeats from Prevotella and Francisella 1 or CRISPR/Cpf1 is a DNA-editing technology which shares some similarities with the CRISPR/Cas9 system. Cpf1 is an RNA-guided endonuclease of a class II CRISPR/Cas system. This acquired immune mechanism is found in Prevotella and Francisella bacteria. It prevents genetic damage from viruses. Cpf1 genes are associated with the CRISPR locus, coding for an endonuclease that use a guide RNA to find and cleave viral DNA. Cpf1 is a smaller and simpler endonuclease than Cas9, overcoming some of the CRISPR/Cas9 system limitations.

[0120] Cpf1 appears in many bacterial species. The ultimate Cpf1 endonuclease that was developed into a tool for genome editing was taken from one of the first 16 species known to harbor it.

[0121] In embodiments, the Cpf1 is a Cpf1 enzyme from Acidaminococcus (species BV3L6, UniProt Accession No. U2UMQ6; SEQ ID NO. 442), having the sequence set forth below:

| | |
|---|---|
| 1 | mtqfegftnl yqvsktlrfe lipqgktlkh iqeqgfieed karndhykel kpiidriykt |
| 61 | yadqclqlvq ldwenlsaai dsyrkektee trnalieeqa tyrnaihdyf igrtdnltda |
| 121 | inkrhaeiyk glfkaelfng kvlkqlgtvt ttehenallr sfdkfttyfs gfyenrknvf |
| 181 | saedistaip hrivqdnfpk fkenchiftr litavpslre hfenvkkaig ifvstsieev |
| 241 | fsfpfynqll tqtqidlynq llggisreag tekikglnev lnlaiqknde tahiiaslph |
| 301 | rfiplfkqil sdrntlsfil eefksdeevi qsfckyktll rnenvletae alfnelnsid |
| 361 | lthifishkk letissalcd hwdtlrnaly erriseltgk itksakekvq rslkhedinl |
| 421 | qeiisaagke lseafkqkts eilshahaal dqplpttlkk qeekeilksq ldsllglyhl |
| 481 | ldwfavdesn evdpefsarl tgiklemeps lsfynkarny atkkpysvek fklnfqmptl |
| 541 | asgwdvnkek nngailfvkn glyylgimpk qkgrykalsf eptektsegf dkmyydyfpd |
| 601 | aakmipkcst qlkavtahfq thttpillsn nfiepleitk eiydlnnpek epkkfqtaya |
| 661 | kktgdqkgyr ealckwidft rdflskytkt tsidlsslrp ssqykdlgey yaelnpllyh |
| 721 | isfqriaeke imdavetgkl ylfqiynkdf akghhgkpnl htlywtglfs penlaktsik |
| 781 | lngqaelfyr pksrmkrmah rlgekmlnkk lkdqktpipd tlyqelydyv nhrlshdlsd |
| 841 | earallpnvi tkevsheiik drrftsdkff fhvpitlnyq aanspskfnq rvnaylkehp |
| 901 | etpiigidrg ernliyitvi dstgkileqr slntiqqfdy qkkldnreke rvaarqawsv |
| 961 | vgtikdlkqg ylsqviheiv dlm1iyqavv vlenlnfgfk skrtgiaeka vyqqfekmli |
| 1021 | dklnclvlkd ypaekvggvl npyqltdqft sfakmgtqsg flfyvpapyt skidpltgfv |
| 1081 | dpfvwktikn hesrkhfleg fdflhydvkt gdfilhfkmn rnlsfqrglp gfmpawdivf |
| 1141 | eknetqfdak gtpfiagkri vpvienhrft gryrdlypan elialleekg ivfrdgsnil |
| 1201 | pkllenddsh aidtmvalir svlqmrnsna atgedyinsp vrdlngvcfd srfqnpewpm |
| 1261 | dadangayhi alkgqlllnh lkeskdlklq ngisnqdwla yiqelrn |

[0122] In some embodiments, the Cpf1 is a Cpf1 enzyme from Lachnospiraceae (species ND2006, UniProt Accession No. AOA182DWE3; SEQ ID NO. 443), having the sequence set forth below:

| | |
|---|---|
| 1 | AASKLEKFTN CYSLSKTLRF KAIPVGKTQE NIDNKRLLVE DEKRAEDYKG VKKLLDRYYL |
| 61 | SFINDVLHSI KLKNLNNYIS LFRKKTRTEK ENKELENLEI NLRKEIAKAF KGAAGYKSLF |
| 121 | KKDIIETILP EAADDKDEIA LVNSFNGFTT AFTGFFDNRE NMFSEEAKST SIAFRCINEN |
| 181 | LTRYISNMDI FEKVDAIFDK HEVQEIKEKI LNSDYDVEDF FEGEFFNFVL TQEGIDVYNA |
| 241 | IIGGFVTESG EKIKGLNEYI NLYNAKTKQA LPKFKPLYKQ VLSDRESLSF YGEGYTSDEE |
| 301 | VLEVFRNTLN KNSEIFSSIK KLEKLFKNFD EYSSAGIFVK NGPAISTISK DIFGEWNLIR |
| 361 | DKWNAEYDDI HLKKKAVVTE KYEDDRRKSF KKIGSFSLEQ LQEYADADLS VVEKLKEIII |
| 421 | QKVDEIYKVY GSSEKLFDAD FVLEKSLKKN DAVVAIMKDL LDSVKSFENY IKAFFGEGKE |
| 481 | TNRDESFYGD FVLAYDILLK VDHIYDAIRN YVTQKPYSKD KFKLYFQNPQ FMGGWDKDKE |
| 541 | TDYRATILRY GSKYYLAIMD KKYAKCLQKI DKDDVNGNYE KINYKLLPGP NKMLPKVFFS |
| 601 | KKWMAYYNPS EDIQKIYKNG TFKKGDMFNL NDCHKLIDFF KDSISRYPKW SNAYDFNFSE |
| 661 | TEKYKDIAGF YREVEEQGYK VSFESASKKE VDKLVEEGKL YMFQIYNKDF SDKSHGTPNL |
| 721 | HTMYFKLLFD ENNHGQIRLS GGAELFMRRA SLKKEELVVH PANSPIANKN PDNPKKTTTL |
| 781 | SYDVYKDKRF SEDQYELHIP IAINKCPKNI FKINTEVRVL LKHDDNPYVI GIDRGERNLL |
| 841 | YIVVVDGKGN IVEQYSLNEI INNFNGIRIK TDYHSLLDKK EKERFEARQN WTSIENIKEL |
| 901 | KAGYISQVVH KICELVEKYD AVIALEDLNS GFKNSRVKVE KQVYQKFEKM LIDKLNYMVD |
| 961 | KKSNPCATGG ALKGYQITNK FESFKSMSTQ NGFIFYIPAW LTSKIDPSTG FVNLLKTKYT |
| 1021 | SIADSKKFIS SFDRIMYVPE EDLFEFALDY KNFSRTDADY IKKWKLYSYG NRIRIFAAAK |
| 1081 | KNNVFAWEEV CLTSAYKELF NKYGINYQQG DIRALLCEQS DKAFYSSFMA LMSLMLQMRN |
| 1141 | SITGRTDVDF LISPVKNSDG IFYDSRNYEA QENAILPKNA DANGAYNIAR KVLWAIGQFK |
| 1201 | KAEDEKLDKV KIAISNKEWL EYAQTSVK |

In some embodiments, the Cpf1 is codon optimized for expression in mammalian cells. In some embodiments, the Cpf1 is codon optimized for expression in human cells.

[0123] In some embodiments, the compositions of the disclosure include a small version of a Cas9 from the bacterium Staphylococcus aureus. The small version of the Cas9 provides advantages over wild type or full length Cas9.

[0124] The Cpf1 locus contains a mixed alpha/beta domain, a RuvC-I followed by a helical region, a RuvC-II and a zinc finger-like domain. The Cpf1 protein has a RuvC-like endonuclease domain that is similar to the RuvC domain of Cas9. Furthermore, Cpf1 does not have a HNH endonuclease domain, and the N-terminal of Cpf1 does not have the alpha-helical recognition lobe of Cas9.

[0125] Cpf1 CRISPR-Cas domain architecture shows that Cpf1 is functionally unique, being classified as Class 2, type V CRISPR system. The Cpf1 loci encode Cas1, Cas2 and Cas4 proteins more similar to types I and III than from type II systems. Database searches suggest the abundance of Cpf1-family proteins in many bacterial species.

[0126] Functional Cpf1 does not require a tracrRNA. Therefore, functional Cpf1 gRNAs of the disclosure may comprise or consist of a crRNA. This benefits genome editing because Cpf1 is not only a smaller nuclease than Cas9, but also it has a smaller sgRNA molecule (proximately half as many nucleotides as Cas9).

[0127] The Cpf1-gRNA (e.g. Cpf1-crRNA) complex cleaves target DNA or RNA by identification of a protospacer adjacent motif 5′-YTN-3′ (where “Y” is a pyrimidine and “N” is any nucleobase) or 5′-TTN-3′, in contrast to the G-rich PAM targeted by Cas9. After identification of PAM, Cpf1 introduces a sticky-end-like DNA double-stranded break of 4 or 5 nucleotides overhang.

[0128] The CRISPR/Cpf1 system comprises or consists of a Cpf1 enzyme and a guide RNA that finds and positions the complex at the correct spot on the double helix to cleave target DNA. In its native bacterial hosts, CRISPR/Cpf1 systems activity has three stages:
[0129] Adaptation, during which Cas1 and Cas2 proteins facilitate the adaptation of small fragments of DNA into the CRISPR array;
[0130] Formation of crRNAs: processing of pre-cr-RNAs producing of mature crRNAs to guide the Cas protein; and
[0131] Interference, in which the Cpf1 is bound to a crRNA to form a binary complex to identify and cleave a target DNA sequence.

[0132] This system has been modified to utilize non-naturally occurring crRNAs, which guide Cpf1 to a desired target sequence in a non-bacterial cell, such as a mammalian cell.

[0133] D. gRNA

[0134] As an RNA guided protein, Cas9 requires a short RNA to direct the recognition of DNA targets. Though Cas9 preferentially interrogates DNA sequences containing a PAM sequence NGG it can bind here without a protospacer target. However, the Cas9-gRNA complex requires a close match to the gRNA to create a double strand break. CRISPR sequences in bacteria are expressed in multiple RNAs and then processed to create guide strands for RNA. Because Eukaryotic systems lack some of the proteins required to process CRISPR RNAs the synthetic construct gRNA was created to combine the essential pieces of RNA for Cas9 targeting into a single RNA expressed with the RNA polymerase type III promoter U6. Synthetic gRNAs are slightly over 100 bp at the minimum length and contain a portion which is targets the 20 protospacer nucleotides immediately preceding the PAM sequence NGG; gRNAs do not contain a PAM sequence.

[0135] In some embodiments, the gRNA targets a site within a wildtype dystrophin gene. In some embodiments, the gRNA targets a site within a mutant dystrophin gene. In some embodiments, the gRNA targets a dystrophin intron. In some embodiments, the gRNA targets dystrophin exon. In some embodiments, the gRNA targets a site in a dystrophin exon that is expressed and is present in one or more of the dystrophin isoforms shown in Table 1. In embodiments, the gRNA targets a dystrophin splice site. In some embodiments, the gRNA targets a splice donor site on the dystrophin gene. In embodiments, the gRNA targets a splice acceptor site on the dystrophin gene.

[0136] In embodiments, the guide RNA targets a mutant DMD exon. In some embodiments, the mutant exon is exon 23 or 51. In some embodiments, the guide RNA targets at least one of exons 1, 23, 41, 44, 46, 47, 48, 49, 50, 51, 52, 53, 54, or 55 of the dystrophin gene. In embodiments, the guide RNA targets at least one of introns 44, 45, 50, 51, 52, 53, 54, or 55 of the dystrophin gene. In preferred embodiments, the guide RNAs are designed to induce skipping of exon 51 or exon 23. In embodiments, the gRNA is targeted to a splice acceptor site of exon 51 or exon 23.

[0137] Suitable gRNAs for use in the methods and compositions disclosed herein are provided as SEQ ID NOs. 60-382. (Table E). In preferred embodiments, the gRNA is selected from any one of SEQ ID No. 60 to SEQ ID No. 382.

[0138] In some embodiments, gRNAs of the disclosure comprise a sequence that is complementary to a target sequence within a coding sequence or a non-coding sequence corresponding to the DMD gene, and, therefore, hybridize to the target sequence. In some embodiments, gRNAs for Cpf1 comprise a single crRNA containing a direct repeat scaffold sequence followed by 24 nucleotides of guide sequence. In some embodiments, a “guide” sequence of the crRNA comprises a sequence of the gRNA that is complementary to a target sequence. In some embodiments, crRNA of the disclosure comprises a sequence of the gRNA that is not complementary to a target sequence. “Scaffold” sequences of the disclosure link the gRNA to the Cpf1 polypeptide. “Scaffold” sequences of the disclosure are not equivalent to a tracrRNA sequence of a gRNA-Cas9 construct.

[0139] E. Cas9 versus Cpf1

[0140] Cas9 requires two RNA molecules to cut DNA while Cpf1 needs one. The proteins also cut DNA at different places, offering researchers more options when selecting an editing site. Cas9 cuts both strands in a DNA molecule at the same position, leaving behind ‘blunt’ ends. Cpf1 leaves one strand longer than the other, creating ‘sticky’ ends that are easier to work with. Cpf1 appears to be more able to insert new sequences at the cut site, compared to Cas9. Although the CRISPR/Cas9 system can efficiently disable genes, it is challenging to insert genes or generate a knock-in. Cpf1 lacks tracrRNA, utilizes a T-rich PAM and cleaves DNA via a staggered DNA DSB.

[0141] In summary, important differences between Cpf1 and Cas9 systems are that Cpf1 recognizes different PAMs, enabling new targeting possibilities, creates 4-5 nt long sticky ends, instead of blunt ends produced by Cas9, enhancing the efficiency of genetic insertions and specificity during NHEJ or HDR, and cuts target DNA further away from PAM, further away from the Cas9 cutting site, enabling new possibilities for cleaving the DNA.

| Feature | Cas9 | Cpf1 |
|---|---|---|
| Structure | Two RNA required (Or 1 fusion | One RNA required |
| | transcript (crRNA + tracrRNA = | |
| | gRNA) | |
| Cutting | Blunt end cuts | Staggered end cuts |
| mechanism | | |
| Cutting site | Proximal to recognition site | Distal from |
| | | recognition site |
| Target sites | G-rich PAM | T-rich PAM |
| Cell type | Fast growing cells, including | Non-dividing cells, |
| | cancer cells | including nerve cells |

[0142] F. CRISPR/Cpf1-Mediated Gene Editing

[0143] The first step in editing the DMD gene using CRISPR/Cpf1 is to identify the genomic target sequence. The genomic target for the gRNAs of the disclosure can be any ˜24 nucleotide DNA sequence within the dystrophin gene, provided that the sequence is unique compared to the rest of the genome. In some embodiments, the genomic target sequence is in exon 51, exon 45, exon 44, exon 53, exon 46, exon 52, exon 50, exon 43, exon 6, exon 7, exon 8, and/or exon 55 of the human dystrophin gene. In some embodiments, the genomic target sequence is a 5′ or 3′ splice site of exon 51, exon 45, exon 44, exon 53, exon 46, exon 52, exon 50, exon 43, exon 6, exon 7, exon 8, and/or exon 55 of the human dystrophin gene. In some embodiments, the genomic target sequence is an intron immediately upstream or downstream of exon 51, exon 45, exon 44, exon 53, exon 46, exon 52, exon 50, exon 43, exon 6, exon 7, exon 8, and/or exon 55 of the human dystrophin gene. Exemplary genomic target sequences can be found in Table D.

[0144] The next step in editing the DMD gene using CRISPR/Cpf1 is to identify all Protospacer Adjacent Motif (PAM) sequences within the genetic region to be targeted. Cpf1 utilizes a T-rich PAM sequence (TTTN, wherein N is any nucleotide). The target sequence must be immediately upstream of a PAM. Once all possible PAM sequences and putative target sites have been identified, the next step is to choose which site is likely to result in the most efficient on-target cleavage. The gRNA targeting sequence needs to match the target sequence, and the gRNA targeting sequence must not match additional sites within the genome. In preferred embodiments, the gRNA targeting sequence has perfect homology to the target with no homology elsewhere in the genome. In some embodiments, a given gRNA targeting sequence will have additional sites throughout the genome where partial homology exists. These sites are called “off-targets” and should be considered when designing a gRNA. In general, off-target sites are not cleaved as efficiently when mismatches occur near the PAM sequence, so gRNAs with no homology or those with mismatches close to the PAM sequence will have the highest specificity. In addition to “off-target activity”, factors that maximize cleavage of the desired target sequence (“on-target activity”) must be considered. It is known to those of skill in the art that two gRNA targeting sequences, each having 100% homology to the target DNA may not result in equivalent cleavage efficiency. In fact, cleavage efficiency may increase or decrease depending upon the specific nucleotides within the selected target sequence. Close examination of predicted on-target and off-target activity of each potential gRNA targeting sequence is necessary to design the best gRNA. Several gRNA design programs have been developed that are capable of locating potential PAM and target sequences and ranking the associated gRNAs based on their predicted on-target and off-target activity (e.g. CRISPRdirect, available at www.crispr.dbcls.jp).

[0145] The next step is to synthesize and clone desired gRNAs. Targeting oligos can be synthesized, annealed, and inserted into plasmids containing the gRNA scaffold using standard restriction-ligation cloning. However, the exact cloning strategy will depend on the gRNA vector that is chosen. The gRNAs for Cpf1 are notably simpler than the gRNAs for Cas9, and only consist of a single crRNA containing direct repeat scaffold sequence followed by ˜24 nucleotides of guide sequence. Cpf1 requires a minimum of 16 nucleotides of guide sequence to achieve detectable DNA cleavage, and a minimum of 18 nucleotides of guide sequence to achieve efficient DNA cleavage in vitro. In some embodiments, 20-24 nucleotides of guide sequence is used. The seed region of the Cpf1 gRNA is generally within the first 5 nucleotides on the 5′ end of the guide sequence. Cpf1 makes a staggered cut in the target genomic DNA. In AsCpf1 and LbCpf1, the cut occurs 19 bp after the PAM on the targeted (+) strand, and 23 bp on the other strand.

[0146] Each gRNA should then be validated in one or more target cell lines. For example, after the CRISPR and gRNA are delivered to the cell, the genomic target region may be amplified using PCR and sequenced according to methods known to those of skill in the art.

[0147] In some embodiments, gene editing may be performed in vitro or ex vivo. In some embodiments, cells are contacted in vitro or ex vivo with a Cpf1 and a gRNA that targets a dystrophin splice site. In some embodiments, the cells are contacted with one or more nucleic acids encoding the Cpf1 and the guide RNA. In some embodiments, the one or more nucleic acids are introduced into the cells using, for example, lipofection or electroporation. Gene editing may also be performed in zygotes. In embodiments, zygotes may be injected with one or more nucleic acids encoding Cpf1 and a gRNA that targets a dystrophin splice site. The zygotes may subsequently be injected into a host.

[0148] In embodiments, the Cpf1 is provided on a vector. In embodiments, the vector contains a Cpf1 sequence derived from a Lachnospiraceae bacterium. See, for example, Uniprot Accession No. A0A182DWE3; SEQ ID NO. 443. In embodiments, the vector contains a Cpf1 sequence derived from an Acidaminococcus bacterium. See, for example, Uniprot Accession No. U2UMQ6; SEQ ID NO. 442. In some embodiments, the Cpf1 sequence is codon optimized for expression in human cells. In some embodiments, the vector further contains a sequence encoding a fluorescent protein, such as GFP, which allows Cpf1-expressing cells to be sorted using fluorescence activated cell sorting (FACS). In some embodiments, the vector is a viral vector such as an adeno-associated viral vector.

[0149] In embodiments, the gRNA is provided on a vector. In some embodiments, the vector is a viral vector such as an adeno-associated viral vector. In embodiments, the Cpf1 and the guide RNA are provided on the same vector. In embodiments, the Cpf1 and the guide RNA are provided on different vectors.

[0150] In some embodiments, the cells are additionally contacted with a single-stranded DMD oligonucleotide to effect homology directed repair. In some embodiments, small INDELs restore the protein reading frame of dystrophin (“reframing” strategy). When the reframing strategy is used, the cells may be contacted with a single gRNA. In embodiments, a splice donor or splice acceptor site is disrupted, which results in exon skipping and restoration of the protein reading frame (“exon skipping” strategy). When the exon skipping strategy is used, the cells may be contacted with two or more gRNAs.

[0151] Efficiency of in vitro or ex vivo Cpf1-mediated DNA cleavage may be assessed using techniques known to those of skill in the art, such as the T7 E1 assay. Restoration of DMD expression may be confirmed using techniques known to those of skill in the art, such as RT-PCR, western blotting, and immunocytochemistry.

[0152] In some embodiments, in vitro or ex vivo gene editing is performed in a muscle or satellite cell. In some embodiments, gene editing is performed in iPSC or iCM cells. In embodiments, the iPSC cells are differentiated after gene editing. For example, the iPSC cells may be differentiated into a muscle cell or a satellite cell after editing. In embodiments, the iPSC cells are differentiated into cardiac muscle cells, skeletal muscle cells, or smooth muscle cells. In embodiments, the iPSC cells are differentiated into cardiomyocytes. iPSC cells may be induced to differentiate according to methods known to those of skill in the art.

[0153] In some embodiments, contacting the cell with the Cpf1 and the gRNA restores dystrophin expression. In embodiments, cells which have been edited in vitro or ex vivo, or cells derived therefrom, show levels of dystrophin protein that is comparable to wild type cells. In embodiments, the edited cells, or cells derived therefrom, express dystrophin at a level that is 50%, 60%, 70%, 80%, 90%, 95% or any percentage in between of wild type dystrophin expression levels. In embodiments, the cells which have been edited in vitro or ex vivo, or cells derived therefrom, have a mitochondrial number that is comparable to that of wild type cells. In embodiments the edited cells, or cells derived therefrom, have 50%, 60%, 70%, 80%, 90%, 95% or any percentage in between as many mitochondria as wild type cells. In embodiments, the edited cells, or cells derived therefrom, show an increase in oxygen consumption rate (OCR) compared to non-edited cells at baseline.

### III. NUCLEIC ACID DELIVERY

[0154] As discussed above, in certain embodiments, expression cassettes are employed to express a transcription factor product, either for subsequent purification and delivery to a cell/subject, or for use directly in a genetic-based delivery approach. Provided herein are expression vectors which contain one or more nucleic acids encoding Cpf1 and at least one DMD guide RNA that targets a dystrophin splice site. In some embodiments, a nucleic acid encoding Cpf1 and a nucleic acid encoding at least one guide RNA are provided on the same vector. In further embodiments, a nucleic acid encoding Cpf1 and a nucleic acid encoding least one guide RNA are provided on separate vectors.

[0155] Expression requires that appropriate signals be provided in the vectors, and include various regulatory elements such as enhancers/promoters from both viral and mammalian sources that drive expression of the genes of interest in cells. Elements designed to optimize messenger RNA stability and translatability in host cells also are defined. The conditions for the use of a number of dominant drug selection markers for establishing permanent, stable cell clones expressing the products are also provided, as is an element that links expression of the drug selection markers to expression of the polypeptide.

[0156] A. Regulatory Elements

[0157] Throughout this application, the term “expression cassette” is meant to include any type of genetic construct containing a nucleic acid coding for a gene product in which part or all of the nucleic acid encoding sequence is capable of being transcribed and translated, i.e., is under the control of a promoter. A “promoter” refers to a DNA sequence recognized by the synthetic machinery of the cell, or introduced synthetic machinery, required to initiate the specific transcription of a gene. The phrase “under transcriptional control” means that the promoter is in the correct location and orientation in relation to the nucleic acid to control RNA polymerase initiation and expression of the gene. An “expression vector” is meant to include expression cassettes comprised in a genetic construct that is capable of replication, and thus including one or more of origins of replication, transcription termination signals, poly-A regions, selectable markers, and multipurpose cloning sites.

[0158] The term promoter will be used here to refer to a group of transcriptional control modules that are clustered around the initiation site for RNA polymerase II. Much of the thinking about how promoters are organized derives from analyses of several viral promoters, including those for the HSV thymidine kinase (tk) and SV40 early transcription units. These studies, augmented by more recent work, have shown that promoters are composed of discrete functional modules, each consisting of approximately 7-20 bp of DNA, and containing one or more recognition sites for transcriptional activator or repressor proteins.

[0159] At least one module in each promoter functions to position the start site for RNA synthesis. The best known example of this is the TATA box, but in some promoters lacking a TATA box, such as the promoter for the mammalian terminal deoxynucleotidyl transferase gene and the promoter for the SV40 late genes, a discrete element overlying the start site itself helps to fix the place of initiation.

[0160] In some embodiments, the Cpf1 constructs of the disclosure are expressed by a muscle-cell specific promoter. This muscle-cell specific promoter may be constitutively active or may be an inducible promoter.

[0161] Additional promoter elements regulate the frequency of transcriptional initiation. Typically, these are located in the region 30-110 bp upstream of the start site, although a number of promoters have recently been shown to contain functional elements downstream of the start site as well. The spacing between promoter elements frequently is flexible, so that promoter function is preserved when elements are inverted or moved relative to one another. In the tk promoter, the spacing between promoter elements can be increased to 50 bp apart before activity begins to decline. Depending on the promoter, it appears that individual elements can function either co-operatively or independently to activate transcription.

[0162] In certain embodiments, viral promotes such as the human cytomegalovirus (CMV) immediate early gene promoter, the SV40 early promoter, the Rous sarcoma virus long terminal repeat, rat insulin promoter and glyceraldehyde-3-phosphate dehydrogenase can be used to obtain high-level expression of the coding sequence of interest. The use of other viral or mammalian cellular or bacterial phage promoters which are well-known in the art to achieve expression of a coding sequence of interest is contemplated as well, provided that the levels of expression are sufficient for a given purpose. By employing a promoter with well-known properties, the level and pattern of expression of the protein of interest following transfection or transformation can be optimized. Further, selection of a promoter that is regulated in response to specific physiologic signals can permit inducible expression of the gene product.

[0163] Enhancers are genetic elements that increase transcription from a promoter located at a distant position on the same molecule of DNA. Enhancers are organized much like promoters. That is, they are composed of many individual elements, each of which binds to one or more transcriptional proteins. The basic distinction between enhancers and promoters is operational. An enhancer region as a whole must be able to stimulate transcription at a distance; this need not be true of a promoter region or its component elements. On the other hand, a promoter must have one or more elements that direct initiation of RNA synthesis at a particular site and in a particular orientation, whereas enhancers lack these specificities. Promoters and enhancers are often overlapping and contiguous, often seeming to have a very similar modular organization.

[0164] The promoter and/or enhancer may be, for example, immunoglobulin light chain, immunoglobulin heavy chain, T-cell receptor, HLA DQ a and/or DQ β, β-interferon, interleukin-2, interleukin-2 receptor, MHC class II 5, MHC class II HLA-Dra, 3-Actin, muscle creatine kinase (MCK), prealbumin (transthyretin), elastase I, metallothionein (MTII), collagenase, albumin, α-fetoprotein, t-globin, β-globin, c-fos, c-HA-ras, insulin, neural cell adhesion molecule (NCAM), α₁-antitrypain, H2B (TH2B) histone, mouse and/or type I collagen, glucose-regulated proteins (GRP94 and GRP78), rat growth hormone, human serum amyloid A (SAA), troponin I (TN I), platelet-derived growth factor (PDGF), duchenne muscular dystrophy, SV40, polyoma, retroviruses, papilloma virus, hepatitis B virus, human immunodeficiency virus, cytomegalovirus (CMV), and gibbon ape leukemia virus.

[0165] In some embodiments, inducible elements may be used. In some embodiments, the inducible element is, for example, MTII, MMTV (mouse mammary tumor virus), β-interferon, adenovirus 5 E2, collagenase, stromelysin, SV40, murine MX gene, GRP78 gene, α-2-macroglobulin, vimentin, MHC class I gene H-2κb, HSP70, proliferin, tumor necrosis factor, and/or thyroid stimulating hormone a gene. In some embodiments, the inducer is phorbol ester (TFA), heavy metals, glucocorticoids, poly(rI)x, poly(rc), E1A, phorbol ester (TPA), interferon, Newcastle Disease Virus, A23187, IL-6, serum, interferon, SV40 large T antigen, PMA, and/or thyroid hormone. Any of the inducible elements described herein may be used with any of the inducers described herein.

[0166] Below is a list of promoters/enhancers and inducible promoters/enhancers that could be used in combination with the nucleic acid encoding a gene of interest in an expression construct. Additionally, any promoter/enhancer combination (as per the Eukaryotic Promoter Data Base EPDB) could also be used to drive expression of the gene. Eukaryotic cells can support cytoplasmic transcription from certain bacterial promoters if the appropriate bacterial polymerase is provided, either as part of the delivery complex or as an additional genetic expression construct.

[0167] Of particular interest are muscle specific promoters. These include the myosin light chain-2 promoter, the α-actin promoter, the troponin 1 promoter; the Na⁺/Ca²⁺ exchanger promoter, the dystrophin promoter, the α7 integrin promoter, the brain natriuretic peptide promoter and the αB-crystallin/small heat shock protein promoter, α-myosin heavy chain promoter, and the ANF promoter.

[0168] In some embodiments, the Cpf1-gRNA constructs of the disclosure are expressed by a muscle-cell specific promoter. This muscle-cell specific promoter may be constitutively active or may be an inducible promoter.

[0169] Where a cDNA insert is employed, one will typically desire to include a polyadenylation signal to effect proper polyadenylation of the gene transcript. The nature of the polyadenylation signal is not believed to be crucial to the successful practice of the methods disclosed herein, and any such sequence may be employed such as human growth hormone and SV40 polyadenylation signals. Also contemplated as an element of the expression cassette is a terminator. These elements can serve to enhance message levels and to minimize read through from the cassette into other sequences.

[0170] B. 2A Peptide

[0171] The inventor utilizes the 2A-like self-cleaving domain from the insect virus Thosea asigna (TaV 2A peptide; SEQ ID NO. 444; EGRGSLLTCGDVEENPGP). These 2A-like domains have been shown to function across Eukaryotes and cause cleavage of amino acids to occur co-translationally within the 2A-like peptide domain. Therefore, inclusion of TaV 2A peptide allows the expression of multiple proteins from a single mRNA transcript. Importantly, the domain of TaV when tested in eukaryotic systems have shown greater than 99% cleavage activity (Donnelly et al., 2001). Other acceptable 2A-like peptides include, but are not limited to, equine rhinitis A virus (ERAV) 2A peptide (SEQ ID NO. 445; QCTNYALLKLAGDVESNPGP), porcine teschovirus-1 (PTV1) 2A peptide (SEQ ID NO. 446; ATNFSLLKQAGDVEENPGP) and foot and mouth disease virus (FMDV) 2A peptide (SEQ ID No. 447; PVKQLLNFDLLKLAGDVESNPGP) or modified versions thereof.

[0172] In some embodiments, the 2A peptide is used to express a reporter and a Cfpl simultaneously. The reporter may be, for example, GFP.

[0173] Other self-cleaving peptides that may be used include, but are not limited to nuclear inclusion protein a (Nia) protease, a P1 protease, a 3C protease, a L protease, a 3C-like protease, or modified versions thereof.

[0174] C. Delivery of Expression Vectors

[0175] There are a number of ways in which expression vectors may introduced into cells. In certain embodiments, the expression construct comprises a virus or engineered construct derived from a viral genome. The ability of certain viruses to enter cells via receptor-mediated endocytosis, to integrate into host cell genome and express viral genes stably and efficiently have made them attractive candidates for the transfer of foreign genes into mammalian cells. These have a relatively low capacity for foreign DNA sequences and have a restricted host spectrum. Furthermore, their oncogenic potential and cytopathic effects in permissive cells raise safety concerns. They can accommodate only up to 8 kB of foreign genetic material but can be readily introduced in a variety of cell lines and laboratory animals.

[0176] One of the preferred methods for in vivo delivery involves the use of an adenovirus expression vector. “Adenovirus expression vector” is meant to include those constructs containing adenovirus sequences sufficient to (a) support packaging of the construct and (b) to express an antisense polynucleotide that has been cloned therein. In this context, expression does not require that the gene product be synthesized.

[0177] The expression vector comprises a genetically engineered form of adenovirus. Knowledge of the genetic organization of adenovirus, a 36 kB, linear, double-stranded DNA virus, allows substitution of large pieces of adenoviral DNA with foreign sequences up to 7 kB. In contrast to retrovirus, the adenoviral infection of host cells does not result in chromosomal integration because adenoviral DNA can replicate in an episomal manner without potential genotoxicity. Also, adenoviruses are structurally stable, and no genome rearrangement has been detected after extensive amplification. Adenovirus can infect virtually all epithelial cells regardless of their cell cycle stage. So far, adenoviral infection appears to be linked only to mild disease such as acute respiratory disease in humans.

[0178] Adenovirus is particularly suitable for use as a gene transfer vector because of its mid-sized genome, ease of manipulation, high titer, wide target cell range and high infectivity. Both ends of the viral genome contain 100-200 base pair inverted repeats (ITRs), which are cis elements necessary for viral DNA replication and packaging. The early (E) and late (L) regions of the genome contain different transcription units that are divided by the onset of viral DNA replication. The E1 region (E1A and E1B) encodes proteins responsible for the regulation of transcription of the viral genome and a few cellular genes. The expression of the E2 region (E2A and E2B) results in the synthesis of the proteins for viral DNA replication. These proteins are involved in DNA replication, late gene expression and host cell shut-off. The products of the late genes, including the majority of the viral capsid proteins, are expressed only after significant processing of a single primary transcript issued by the major late promoter (MLP). The MLP, (located at 16.8 m.u.) is particularly efficient during the late phase of infection, and all the mRNA's issued from this promoter possess a 5′-tripartite leader (TPL) sequence which makes them preferred mRNA's for translation.

[0179] In one system, recombinant adenovirus is generated from homologous recombination between shuttle vector and provirus vector. Due to the possible recombination between two proviral vectors, wild-type adenovirus may be generated from this process. Therefore, it is critical to isolate a single clone of virus from an individual plaque and examine its genomic structure.

[0180] Generation and propagation of the current adenovirus vectors, which are replication deficient, depend on a unique helper cell line, designated 293, which was transformed from human embryonic kidney cells by Ad5 DNA fragments and constitutively expresses E1 proteins. Since the E3 region is dispensable from the adenovirus genome, the current adenovirus vectors, with the help of 293 cells, carry foreign DNA in either the E1, the D3 or both regions. In nature, adenovirus can package approximately 105% of the wild-type genome, providing capacity for about 2 extra kb of DNA. Combined with the approximately 5.5 kb of DNA that is replaceable in the E1 and E3 regions, the maximum capacity of the current adenovirus vector is under 7.5 kb, or about 15% of the total length of the vector. More than 80% of the adenovirus viral genome remains in the vector backbone and is the source of vector-borne cytotoxicity. Also, the replication deficiency of the E1-deleted virus is incomplete.

[0181] Helper cell lines may be derived from human cells such as human embryonic kidney cells, muscle cells, hematopoietic cells or other human embryonic mesenchymal or epithelial cells. Alternatively, the helper cells may be derived from the cells of other mammalian species that are permissive for human adenovirus. Such cells include, e.g., Vero cells or other monkey embryonic mesenchymal or epithelial cells. As stated above, the preferred helper cell line is 293.

[0182] Racher et al. (1995) disclosed improved methods for culturing 293 cells and propagating adenovirus. In one format, natural cell aggregates are grown by inoculating individual cells into 1 liter siliconized spinner flasks (Techne, Cambridge, UK) containing 100-200 ml of medium. Following stirring at 40 rpm, the cell viability is estimated with trypan blue. In another format, Fibra-Cel microcarriers (Bibby Sterlin, Stone, UK) (5 g/l) is employed as follows. A cell inoculum, resuspended in 5 ml of medium, is added to the carrier (50 ml) in a 250 ml Erlenmeyer flask and left stationary, with occasional agitation, for 1 to 4 h. The medium is then replaced with 50 ml of fresh medium and shaking initiated. For virus production, cells are allowed to grow to about 80% confluence, after which time the medium is replaced (to 25% of the final volume) and adenovirus added at an MOI of 0.05. Cultures are left stationary overnight, following which the volume is increased to 100% and shaking commenced for another 72 h.

[0183] The adenoviruses of the disclosure are replication defective or at least conditionally replication defective. Other than the requirement that the adenovirus vector be replication defective, or at least conditionally defective, the nature of the adenovirus vector is not believed to be crucial to the successful practice of the methods disclosed herein. The adenovirus may be of any of the 42 different known serotypes or subgroups A-F. Adenovirus type 5 of subgroup C is the preferred starting material in order to obtain the conditional replication-defective adenovirus vector for use in the present disclosure.

[0184] As stated above, the typical vector according to the present disclosure is replication defective and will not have an adenovirus E1 region. Thus, it will be most convenient to introduce the polynucleotide encoding the gene of interest at the position from which the E1-coding sequences have been removed. However, the position of insertion of the construct within the adenovirus sequences is not critical. The polynucleotide encoding the gene of interest may also be inserted in lieu of the deleted E3 region in E3 replacement vectors, as described by Karlsson et al. (1986), or in the E4 region where a helper cell line or helper virus complements the E4 defect.

[0185] Adenovirus is easy to grow and manipulate and exhibits broad host range in vitro and in vivo. This group of viruses can be obtained in high titers, e.g., 10⁹-10¹² plaque-forming units per ml, and they are highly infective. The life cycle of adenovirus does not require integration into the host cell genome. The foreign genes delivered by adenovirus vectors are episomal and, therefore, have low genotoxicity to host cells. No side effects have been reported in studies of vaccination with wild-type adenovirus (Couch et al., 1963; Top et al., 1971), demonstrating their safety and therapeutic potential as in vivo gene transfer vectors.

[0186] Adenovirus vectors have been used in eukaryotic gene expression and vaccine development. Animal studies suggested that recombinant adenovirus could be used for gene therapy. Studies in administering recombinant adenovirus to different tissues include trachea instillation, muscle injection, peripheral intravenous injections and stereotactic inoculation into the brain.

[0187] The retroviruses are a group of single-stranded RNA viruses characterized by an ability to convert their RNA to double-stranded DNA in infected cells by a process of reverse-transcription. The resulting DNA then stably integrates into cellular chromosomes as a provirus and directs synthesis of viral proteins. The integration results in the retention of the viral gene sequences in the recipient cell and its descendants. The retroviral genome contains three genes, gag, pol, and env that code for capsid proteins, polymerase enzyme, and envelope components, respectively. A sequence found upstream from the gag gene contains a signal for packaging of the genome into virions. Two long terminal repeat (LTR) sequences are present at the 5′ and 3′ ends of the viral genome. These contain strong promoter and enhancer sequences and are also required for integration in the host cell genome.

[0188] In order to construct a retroviral vector, a nucleic acid encoding a gene of interest is inserted into the viral genome in the place of certain viral sequences to produce a virus that is replication-defective. In order to produce virions, a packaging cell line containing the gag, pol, and env genes but without the LTR and packaging components is constructed. When a recombinant plasmid containing a cDNA, together with the retroviral LTR and packaging sequences is introduced into this cell line (by calcium phosphate precipitation for example), the packaging sequence allows the RNA transcript of the recombinant plasmid to be packaged into viral particles, which are then secreted into the culture media. The media containing the recombinant retroviruses is then collected, optionally concentrated, and used for gene transfer. Retroviral vectors are able to infect a broad variety of cell types. However, integration and stable expression require the division of host cells.

[0189] A novel approach designed to allow specific targeting of retrovirus vectors was recently developed based on the chemical modification of a retrovirus by the chemical addition of lactose residues to the viral envelope. This modification could permit the specific infection of hepatocytes via sialoglycoprotein receptors.

[0190] A different approach to targeting of recombinant retroviruses may be used, in which biotinylated antibodies against a retroviral envelope protein and against a specific cell receptor are used. The antibodies are coupled via the biotin components by using streptavidin. Using antibodies against major histocompatibility complex class I and class II antigens, it has been demonstrated the infection of a variety of human cells that bore those surface antigens with an ecotropic virus in vitro (Roux et al., 1989).

[0191] There are certain limitations to the use of retrovirus vectors in all aspects of the present disclosure. For example, retrovirus vectors usually integrate into random sites in the cell genome. This can lead to insertional mutagenesis through the interruption of host genes or through the insertion of viral regulatory sequences that can interfere with the function of flanking genes. Another concern with the use of defective retrovirus vectors is the potential appearance of wild-type replication-competent virus in the packaging cells. This can result from recombination events in which the intact-sequence from the recombinant virus inserts upstream from the gag, pol, env sequence integrated in the host cell genome. However, new packaging cell lines are now available that should greatly decrease the likelihood of recombination (see, for example, Markowitz et al., 1988; Hersdorffer et al., 1990).

[0192] Other viral vectors may be employed as expression constructs in the present disclosure. Vectors derived from viruses such as vaccinia virus, adeno-associated virus (AAV) and herpesviruses may be employed. They offer several attractive features for various mammalian cells.

[0193] In embodiments, the AAV vector is replication-defector or conditionally replication defective. In embodiments, the AAV vector is a recombinant AAV vector. In some embodiments, the AAV vector comprises a sequence isolated or derived from an AAV vector of serotype AAV1, AAV2, AAV3, AAV4, AAV5, AAV6, AAV7, AAV8, AAV9, AAV10, AAV11 or any combination thereof. In some embodiments, the AAV vector is not an AAV9 vector.

[0194] In some embodiments, a single viral vector is used to deliver a nucleic acid encoding Cpf1 and at least one gRNA to a cell. In some embodiments, Cpf1 is provided to a cell using a first viral vector and at least one gRNA is provided to the cell using a second viral vector. In order to effect expression of sense or antisense gene constructs, the expression construct must be delivered into a cell. The cell may be a muscle cell, a satellite cell, a mesangioblast, a bone marrow derived cell, a stromal cell or a mesenchymal stem cell. In embodiments, the cell is a cardiac muscle cell, a skeletal muscle cell, or a smooth muscle cell. In embodiments, the cell is a cell in the tibialis anterior, quadriceps, soleus, diaphragm or heart. In some embodiments, the cell is an induced pluripotent stem cell (iPSC) or inner cell mass cell (iCM). In further embodiments, the cell is a human iPSC or a human iCM. In some embodiments, human iPSCs or human iCMs of the disclosure may be derived from a cultured stem cell line, an adult stem cell, a placental stem cell, or from another source of adult or embryonic stem cells that does not require the destruction of a human embryo. Delivery to a cell may be accomplished in vitro, as in laboratory procedures for transforming cells lines, or in vivo or ex vivo, as in the treatment of certain disease states. One mechanism for delivery is via viral infection where the expression construct is encapsulated in an infectious viral particle.

[0195] Several non-viral methods for the transfer of expression constructs into cultured mammalian cells also are contemplated by the present disclosure. These include calcium phosphate precipitation (Graham and Van Der Eb, 1973; Chen and Okayama, 1987; Rippe et al., 1990) DEAE-dextran (Gopal, 1985), electroporation (Tur-Kaspa et al., 1986; Potter et al., 1984), direct microinjection (Harland and Weintraub, 1985), DNA-loaded liposomes (Nicolau and Sene, 1982; Fraley et al., 1979) and lipofectamine-DNA complexes, cell sonication (Fechheimer et al., 1987), gene bombardment using high velocity microprojectiles (Yang et al., 1990), and receptor-mediated transfection (Wu and Wu, 1987; Wu and Wu, 1988). Some of these techniques may be successfully adapted for in vivo or ex vivo use.

[0196] Once the expression construct has been delivered into the cell the nucleic acid encoding the gene of interest may be positioned and expressed at different sites. In certain embodiments, the nucleic acid encoding the gene may be stably integrated into the genome of the cell. This integration may be in the cognate location and orientation via homologous recombination (gene replacement) or it may be integrated in a random, non-specific location (gene augmentation). In yet further embodiments, the nucleic acid may be stably maintained in the cell as a separate, episomal segment of DNA. Such nucleic acid segments or “episomes” encode sequences sufficient to permit maintenance and replication independent of or in synchronization with the host cell cycle. How the expression construct is delivered to a cell and where in the cell the nucleic acid remains is dependent on the type of expression construct employed.

[0197] In yet another embodiment, the expression construct may simply consist of naked recombinant DNA or plasmids. Transfer of the construct may be performed by any of the methods mentioned above which physically or chemically permeabilize the cell membrane. This is particularly applicable for transfer in vitro but it may be applied to in vivo use as well. Dubensky et al. (1984) successfully injected polyomavirus DNA in the form of calcium phosphate precipitates into liver and spleen of adult and newborn mice demonstrating active viral replication and acute infection. Benvenisty and Neshif (1986) also demonstrated that direct intraperitoneal injection of calcium phosphate-precipitated plasmids results in expression of the transfected genes. DNA encoding a gene of interest may also be transferred in a similar manner in vivo and express the gene product.

[0198] In still another embodiment for transferring a naked DNA expression construct into cells may involve particle bombardment. This method depends on the ability to accelerate DNA-coated microprojectiles to a high velocity allowing them to pierce cell membranes and enter cells without killing them. Several devices for accelerating small particles have been developed. One such device relies on a high voltage discharge to generate an electrical current, which in turn provides the motive force (Yang et al., 1990). The microprojectiles used have consisted of biologically inert substances such as tungsten or gold beads.

[0199] In some embodiments, the expression construct is delivered directly to the liver, skin, and/or muscle tissue of a subject. This may require surgical exposure of the tissue or cells, to eliminate any intervening tissue between the gun and the target organ, i.e., ex vivo treatment. Again, DNA encoding a particular gene may be delivered via this method and still be incorporated by the present disclosure.

[0200] In a further embodiment, the expression construct may be entrapped in a liposome. Liposomes are vesicular structures characterized by a phospholipid bilayer membrane and an inner aqueous medium. Multilamellar liposomes have multiple lipid layers separated by aqueous medium. They form spontaneously when phospholipids are suspended in an excess of aqueous solution. The lipid components undergo self-rearrangement before the formation of closed structures and entrap water and dissolved solutes between the lipid bilayers. Also contemplated are lipofectamine-DNA complexes.

[0201] Liposome-mediated nucleic acid delivery and expression of foreign DNA in vitro has been very successful. Wong et al., (1980) demonstrated the feasibility of liposome-mediated delivery and expression of foreign DNA in cultured chick embryo, HeLa and hepatoma cells. Nicolau et al., (1987) accomplished successful liposome-mediated gene transfer in rats after intravenous injection. A reagent known as Lipofectamine 2000™ is widely used and commercially available.

[0202] In certain embodiments, the liposome may be complexed with a hemagglutinating virus (HVJ). This has been shown to facilitate fusion with the cell membrane and promote cell entry of liposome-encapsulated DNA. In other embodiments, the liposome may be complexed or employed in conjunction with nuclear non-histone chromosomal proteins (HMG-1). In yet further embodiments, the liposome may be complexed or employed in conjunction with both HVJ and HMG-1. In that such expression constructs have been successfully employed in transfer and expression of nucleic acid in vitro and in vivo, then they are applicable for the present disclosure. Where a bacterial promoter is employed in the DNA construct, it also will be desirable to include within the liposome an appropriate bacterial polymerase.

[0203] Other expression constructs which can be employed to deliver a nucleic acid encoding a particular gene into cells are receptor-mediated delivery vehicles. These take advantage of the selective uptake of macromolecules by receptor-mediated endocytosis in almost all eukaryotic cells. Because of the cell type-specific distribution of various receptors, the delivery can be highly specific.

[0204] Receptor-mediated gene targeting vehicles generally consist of two components: a cell receptor-specific ligand and a DNA-binding agent. Several ligands have been used for receptor-mediated gene transfer. The most extensively characterized ligands are asialoorosomucoid (ASOR) and transferrin. A synthetic neoglycoprotein, which recognizes the same receptor as ASOR, has been used as a gene delivery vehicle and epidermal growth factor (EGF) has also been used to deliver genes to squamous carcinoma cells.

### IV. PHARMACEUTICAL COMPOSITIONS AND DELIVERY METHODS

[0205] For clinical applications, pharmaceutical compositions are prepared in a form appropriate for the intended application. Generally, this entails preparing compositions that are essentially free of pyrogens, as well as other impurities that could be harmful to humans or animals.

[0206] Appropriate salts and buffers are used to render drugs, proteins or delivery vectors stable and allow for uptake by target cells. Aqueous compositions of the present disclosure comprise an effective amount of the drug, vector or proteins, dissolved or dispersed in a pharmaceutically acceptable carrier or aqueous medium. The phrase “pharmaceutically or pharmacologically acceptable” refers to molecular entities and compositions that do not produce adverse, allergic, or other untoward reactions when administered to an animal or a human. As used herein, “pharmaceutically acceptable carrier” includes solvents, buffers, solutions, dispersion media, coatings, antibacterial and antifungal agents, isotonic and absorption delaying agents and the like acceptable for use in formulating pharmaceuticals, such as pharmaceuticals suitable for administration to humans. The use of such media and agents for pharmaceutically active substances is well known in the art. Any conventional media or agent that is not incompatible with the active ingredients of the present disclosure, its use in therapeutic compositions may be used. Supplementary active ingredients also can be incorporated into the compositions, provided they do not inactivate the vectors or cells of the compositions.

[0207] In some embodiments, the active compositions of the present disclosure include classic pharmaceutical preparations. Administration of these compositions according to the present disclosure may be via any common route so long as the target tissue is available via that route, but generally including systemic administration. This includes oral, nasal, or buccal. Alternatively, administration may be by intradermal, subcutaneous, intramuscular, intraperitoneal or intravenous injection, or by direct injection into muscle tissue. Such compositions are normally administered as pharmaceutically acceptable compositions, as described supra.

[0208] The active compounds may also be administered parenterally or intraperitoneally. By way of illustration, solutions of the active compounds as free base or pharmacologically acceptable salts can be prepared in water suitably mixed with a surfactant, such as hydroxypropylcellulose. Dispersions can also be prepared in glycerol, liquid polyethylene glycols, and mixtures thereof and in oils. Under ordinary conditions of storage and use, these preparations generally contain a preservative to prevent the growth of microorganisms.

[0209] The pharmaceutical forms suitable for injectable use include, for example, sterile aqueous solutions or dispersions and sterile powders for the extemporaneous preparation of sterile injectable solutions or dispersions. Generally, these preparations are sterile and fluid to the extent that easy injectability exists. Preparations should be stable under the conditions of manufacture and storage and should be preserved against the contaminating action of microorganisms, such as bacteria and fungi. Appropriate solvents or dispersion media may contain, for example, water, ethanol, polyol (for example, glycerol, propylene glycol, and liquid polyethylene glycol, and the like), suitable mixtures thereof, and vegetable oils. The proper fluidity can be maintained, for example, by the use of a coating, such as lecithin, by the maintenance of the required particle size in the case of dispersion and by the use of surfactants. The prevention of the action of microorganisms can be brought about by various antibacterial an antifungal agents, for example, parabens, chlorobutanol, phenol, sorbic acid, thimerosal, and the like. In many cases, it will be preferable to include isotonic agents, for example, sugars or sodium chloride. Prolonged absorption of the injectable compositions can be brought about by the use in the compositions of agents delaying absorption, for example, aluminum monostearate and gelatin.

[0210] Sterile injectable solutions may be prepared by incorporating the active compounds in an appropriate amount into a solvent along with any other ingredients (for example as enumerated above) as desired, followed by filtered sterilization. Generally, dispersions are prepared by incorporating the various sterilized active ingredients into a sterile vehicle which contains the basic dispersion medium and the desired other ingredients, e.g., as enumerated above. In the case of sterile powders for the preparation of sterile injectable solutions, the preferred methods of preparation include vacuum-drying and freeze-drying techniques which yield a powder of the active ingredient(s) plus any additional desired ingredient from a previously sterile-filtered solution thereof.

[0211] In some embodiments, the compositions of the present disclosure are formulated in a neutral or salt form. Pharmaceutically-acceptable salts include, for example, acid addition salts (formed with the free amino groups of the protein) derived from inorganic acids (e.g., hydrochloric or phosphoric acids, or from organic acids (e.g., acetic, oxalic, tartaric, mandelic, and the like. Salts formed with the free carboxyl groups of the protein can also be derived from inorganic bases (e.g., sodium, potassium, ammonium, calcium, or ferric hydroxides) or from organic bases (e.g., isopropylamine, trimethylamine, histidine, procaine and the like.

[0212] Upon formulation, solutions are preferably administered in a manner compatible with the dosage formulation and in such amount as is therapeutically effective. The formulations may easily be administered in a variety of dosage forms such as injectable solutions, drug release capsules and the like. For parenteral administration in an aqueous solution, for example, the solution generally is suitably buffered and the liquid diluent first rendered isotonic for example with sufficient saline or glucose. Such aqueous solutions may be used, for example, for intravenous, intramuscular, subcutaneous and intraperitoneal administration. Preferably, sterile aqueous media are employed as is known to those of skill in the art, particularly in light of the present disclosure. By way of illustration, a single dose may be dissolved in 1 ml of isotonic NaCl solution and either added to 1000 ml of hypodermoclysis fluid or injected at the proposed site of infusion, (see for example, “Remington's Pharmaceutical Sciences” 15th Edition, pages 1035-1038 and 1570-1580). Some variation in dosage will necessarily occur depending on the condition of the subject being treated. The person responsible for administration will, in any event, determine the appropriate dose for the individual subject. Moreover, for human administration, preparations should meet sterility, pyrogenicity, general safety and purity standards as required by FDA Office of Biologics standards.

[0213] In some embodiments, the Cpf1 and gRNAs described herein may be delivered to the patient using adoptive cell transfer (ACT). In adoptive cell transfer, one or more expression constructs are provided ex vivo to cells which have originated from the patient (autologous) or from one or more individual(s) other than the patient (allogeneic). The cells are subsequently introduced or reintroduced into the patient. Thus, in some embodiments, one or more nucleic acids encoding Cpf1 and a guide RNA that targets a dystrophin splice site are provided to a cell ex vivo before the cell is introduced or reintroduced to a patient.

### V. SEQUENCE TABLES

[0214] The following tables provide exemplary primer sequences and gRNA sequences for use in connection with the compositions and methods disclosed herein.

TABLE C
PRIMER SEQUENCES

| | Primer Name | Primer Sequence | |
|---|---|---|---|
| Cloning primers | AgeI-nLbCpf1-F1 | F | tttttttcaggttGGaccggtgccaccATGAGCAAGCTGGA (SEQ ID NO: 8) |
| for pCpf1-2A-GFP | nLbCpf1-R1 | R | TGGGGTTATAGTAGGCCATCCACTTC (SEQ ID NO: 9) |
| | nLbCpf1-F2 | F | GATGGCCTACTATAACCCCAGCG (SEQ ID NO: 10) |
| | nLbCpf1-R2 | R | GGCATAGTCGGGGACATCATATG (SEQ ID NO: 11) |
| | AgeI-nAsCpf1-F1 | F | tttttttcaggttGGaccggtgccaccATGACACAGTTCGAG (SEQ ID NO: 12) |
| | nAsCpf1-R1 | R | TCCTTCTCAGGATTGTTCAGGTCGTA (SEQ ID NO: 13) |
| | nAsCpf1-F2 | F | CTGAACAATCCTGAGAAGGAGCC (SEQ ID NO: 14) |
| | nAsCpf1-R2 | R | GGCATAGTCGGGGACATCATATG (SEQ ID NO: 11) |
| | nCpf1-2A-GFP-F | F | ATGATGTCCCCGACTATGCCgaattcGGCAGTGGAGAGGG (SEQ ID NO: 15) |
| | nCpf1-2A-GFP-R | R | AGCGAGCTCTAGttagaattcCTTGTACAG (SEQ ID NO: 16) |
| In vitro | T7-Scaffold-F | F | CACCAGCGCTGCTTAATACGACTCACTATAGGGAAAT (SEQ ID NO: 17) |
| transcription of | T7-Scaffold-R | R | AGTAGCGCTTCTAGACCCTCACTTCCTACTCAG (SEQ ID NO: 18) |
| LbCpf1 mRNA | T7-nLb-F1 | F | AGAAGAAATATAAGACTCGAGgccaccATGAGCAAGCTGGAGAAGTTTAC (SEQ ID |
| | | | NO: 19) |
| | T7-nLb-R1 | R | TGGGGTTATAGTAGGCCATCC (SEQ ID NO: 20) |
| | T7-nLB-NLS-F2 | F | GATGGCCTACTATAACCCCAGCG (SEQ ID NO: 10) |
| | T7-nLB-NLS-R2 | R | CCCGCAGAAGGCAGCGTCGACTTAGGCATAGTCGGGGACATCATATG (SEQ ID NO: |
| | | | 21) |
| | T7-nAs-F1 | F | AGAAGAAATATAAGACTCGAGgccaccATGACACAGTTCGAGGGCTTTAC (SEQ ID |
| | | | NO: 22) |
| | T7-nAs-R1 | R | TCCTTCTCAGGATTGTTCAGGTCGTA (SEQ ID NO: 13) |
| | T7-nAs-NLS-F2 | F | CTGAACAATCCTGAGAAGGAGCC (SEQ ID NO: 14) |
| | T7-nAs-NLS-R2 | R | CCCGCAGAAGGCAGCGTCGACTTAGGCATAGTCGGGGACATCATATG (SEQ ID NO: |
| | | | 21) |
| Human DMD Exon | nLb-DMD-E51-g1-Top | F | CACCGTAATTTCTACTAAGTGTAGATgCTCCTACTCAGACTGTTACTCTGTTTTTTT |
| 51 gRNA | | | (SEQ ID NO: 23) |
| | nLb-DMD-E51-g1-Bot | R | AAACAAAAAAACAGAGTAACAGTCTGAGTAGGAGcATCTACACTTAGTAGAAATTAC |
| | | | (SEQ ID NO: 24) |
| | nLb-DMD-E51-g2-Top | F | CACCGTAATTTCTACTAAGTGTAGATtaccatgtattgctaaacaaagtaTTTTTTT |
| | | | (SEQ ID NO: 25) |
| | nLb-DMD-E51-g2-Bot | R | AAACAAAAAAAtactttgtttagcaatacatggtaATCTACACTTAGTAGAAATTAC |
| | | | (SEQ ID NO: 26) |
| | nLb-DMD-E51-g3-Top | F | CACCGTAATTTCTACTAAGTGTAGATattgaagagtaacaatttgagccaTTTTTTT |
| | | | (SEQ ID NO: 27) |
| | nLb-DMD-E51-g3-Bot | R | AAACAAAAAAAtggctcaaattgttactcttcaatATCTACACTTAGTAGAAATTAC |
| | | | (SEQ ID NO: 28) |
| | nAs-DMD-E51-g1-Top | F | CACCGTAATTTCTACTCTTGTAGATgCTCCTACTCAGACTGTTACTCTGTTTTTTT |
| | | | (SEQ ID NO: 29) |
| | nAs-DMD-E51-g1-Bot | R | AAACAAAAAAACAGAGTAACAGTCTGAGTAGGAGcATCTACAAGAGTAGAAATTAC(SEQ |
| | | | ID NO: 30) |
| Human DMD Exon | DMD-E51-T7E1-F1 | F | Ttccctggcaaggtctga (SEQ ID NO: 31) |
| 51 T7E1 | DMD-E51-T7E1-R1 | R | ATCCTCAAGGTCACCCACC (SEQ ID NO: 32) |
| Human | Riken51-RT-PCR-F1 | F | CCCAGAAGAGCAAGATAAACTTGAA (SEQ ID NO: 1) |
| cardiomyocytes | Riken51-RT-PCR-R1 | R | CTCTGTTCCAAATCCTCCATTGT (SEQ ID NO: 33) |
| RT-PCR | | | |
| Human | hmtND1-qF1 | F | CGCCACATCTACCATCACCCTC (SEQ ID NO: 3) |
| cardiomyocytes | hmtND1-qR1 | R | CGGCTAGGCTAGAGGTCGCTA (SEQ ID NO: 4) |
| mtDNA copy | hLPL-gF1 | F | GAGTATGCAGAAGCCCCGAGTC (SEQ ID NO: 5) |
| number qPCR | hLPL-qR1 | R | TCAACATGCCCAACTGGTTTCTGG (SEQ ID NO: 6) |
| Mouse Dmd Exon | nLb-dmd-E23-g1-Top | F | CACCGTAATTTCTACTAAGTGTAGATaggctctgcaaagttctTTGAAAGTTTTTTT |
| 23 gRNA | | | (SEQ ID NO: 34) |
| | nLb-dmd-E23-g1-Bot | R | AAACAAAAAAACTTTCAAagaactttgcagagcctATCTACACTTAGTAGAAATTAC |
| | | | (SEQ ID NO: 35) |
| | nLb-dmd-E23-g2-Top | F | CACCGTAATTTCTACTAAGTGTAGATAAAGAGCAACAAAATGGCttcaacTTTTTTT |
| | | | (SEQ ID NO: 36) |
| | nLb-dmd-E23-g2-Bot | R | AAACAAAAAAAgttgaaGCCATTTTGTTGCTCTTTATCTACACTTAGTAGAAATTAC |
| | | | (SEQ ID NO: 37) |
| | nLb-mdmd-E23-g2-Top | F | CACCGTAATTTCTACTAAGTGTAGATAAAGAGCAATAAAATGGCttcaacTTTTTTT |
| | | | (SEQ ID NO: 38) |
| | nLb-mdmd-E23-g2-Bot | R | AAACAAAAAAAgttgaaGCCATTTTATTGCTCTTTATCTACACTTAGTAGAAATTAC |
| | | | (SEQ ID NO: 39) |
| | nLb-dmd-E23-g3-Top | F | CACCGTAATTTCTACTAAGTGTAGATAAAGAACTTTGCAGAGCctcaaaaTTTTTTT |
| | | | (SEQ ID NO: 40) |
| | nLb-dmd-E23-g3-Bot | R | AAACAAAAAAAttttgagGCTCTGCAAAGTTCTTTATCTACACTTAGTAGAAATTAC |
| | | | (SEQ ID NO: 41) |
| | nLb-dmd-I22-g1-Top | F | CACCGTAATTTCTACTAAGTGTAGATctgaatatctatgcattaataactTTTTTTT |
| | | | (SEQ ID NO: 42) |
| | nLb-dmd-I22-g1-Bot | R | AAACAAAAAAAagttattaatgcatagatattcagATCTACACTTAGTAGAAATTAC |
| | | | (SEQ ID NO: 43) |
| | nLb-dmd-I22-g2-Top | F | CACCGTAATTTCTACTAAGTGTAGATtattatattacagggcatattataTTTTTTT |
| | | | (SEQ ID NO: 44) |
| | nLb-dmd-I22-g2-Bot | R | AAACAAAAAAAtataatatgccctgtaatataataATCTACACTTAGTAGAAATTAC |
| | | | (SEQ ID NO: 45) |
| | nLb-dmd-I23-g3-Top | F | CACCGTAATTTCTACTAAGTGTAGATAGgtaagccgaggtttggcctttaTTTTTTT |
| | | | (SEQ ID NO: 46) |
| | nLb-dmd-I23-g3-Bot | R | AAACAAAAAAAtaaaggccaaacctcggcttacCTATCTACACTTAGTAGAAATTAC |
| | | | (SEQ ID NO: 47) |
| | nLb-dmd-I23-g4-Top | F | CACCGTAATTTCTACTAAGTGTAGATcccagagtccttcaaagatattgaTTTTTTT |
| | | | (SEQ ID NO: 48) |
| | nLb-dmd-I23-g4-Bot | R | AAACAAAAAAAtcaatatctttgaaggactctgggATCTACACTTAGTAGAAATTAC |
| | | | (SEQ ID NO: 49) |
| In vitro | T7-Lb-dmd-E23-uF | F | GAATTGTAATACGACTCACTATAGGGTAATTTCTACTAAGTGTAGAT (SEQ ID NO: |
| transcription | | | 50) |
| of LbCpf1 gRNA | T7-Lb-dmd-E23-g1-R | R | CTTTCAAagaactttgcagagcctATCTACACTTAGTAGAAATTA (SEQ ID NO: 51) |
| | T7-Lb-dmd-E23-mg2-R | R | GttgaaGCCATTTTATTGCTCTTTATCTACACTTAGTAGAAATTA (SEQ ID NO: 52) |
| | T7-Lb-dmd-E23-g3-R | R | ttttgagGCTCTGCAAAGTTCTTTATCTACACTTAGTAGAAATTA (SEQ ID NO: 53) |
| | T7-Lb-dmd-I22-g2-R | R | tataatatgccctgtaatataataATCTACACTTAGTAGAAATTACCCTATAGTGAG |
| | | | (SEQ ID NO: 54) |
| | T7-Lb-dmd-I22-g4-R | R | tcaatatctttgaaggactctgggATCTACACTTAGTAGAAATTACCCTATAGTGAG |
| | | | (SEQ ID NO: 55) |
| Mouse Dmd Exon | Dmd-E23-T7E1-F729 | F | Gagaaacttctgtgatgtgaggacata (SEQ ID NO: 56) |
| 23 T7E1 | Dmd-E23-T7E1-R1 | R | CAAACCTCGGCTTACCTGAAAT (SEQ ID NO: 57) |
| | Dmd-E23-T7E1-R729 | R | Caatatctttgaaggactctgggtaaa (SEQ ID NO: 58) |
| | Dmd-E23-T7E1-R3 | R | Aattaatagaagtcaatgtagggaagg (SEQ ID NO: 59) |

TABLE D
Genomic Target Sequences

| Targeted gRNA | Guide | | | | SEQ ID |
|---|---|---|---|---|---|
| Exon | # | Strand | Genomic Target Sequence* | PAM | NO. |
| Human-Exon 51 | 4 | 1 | tctttttcttcttttttccttttt | tttt | 60 |
| Human-Exon 51 | 5 | 1 | ctttttcttcttttttcctttttG | tttt | 61 |
| Human-Exon 51 | 6 | 1 | tttttcttcttttttcctttttGC | tttc | 62 |
| Human-Exon 51 | 7 | 1 | tcttcttttttcctttttGCAAAA | tttt | 63 |
| Human-Exon 51 | 8 | 1 | cttcttttttcctttttGCAAAAA | tttt | 64 |
| Human-Exon 51 | 9 | 1 | ttcttttttcctttttGCAAAAAC | tttc | 65 |
| Human-Exon 51 | 10 | 1 | ttcctttttGCAAAAACCCAAAAT | tttt | 66 |
| Human-Exon 51 | 11 | 1 | tcctttttGCAAAAACCCAAAATA | tttt | 67 |
| Human-Exon 51 | 12 | 1 | cctttttGCAAAAACCCAAAATAT | tttt | 68 |
| Human-Exon 51 | 13 | 1 | ctttttGCAAAAACCCAAAATATT | tttc | 69 |
| Human-Exon 51 | 14 | 1 | tGCAAAAACCCAAAATATTTTAGC | tttt | 70 |
| Human-Exon 51 | 15 | 1 | GCAAAAACCCAAAATATTTTAGCT | tttt | 71 |
| Human-Exon 51 | 16 | 1 | CAAAAACCCAAAATATTTTAGCTC | tttG | 72 |
| Human-Exon 51 | 17 | 1 | AGCTCCTACTCAGACTGTTACTCT | TTTT | 73 |
| Human-Exon 51 | 18 | 1 | GCTCCTACTCAGACTGTTACTCTG | TTTA | 74 |
| Human-Exon 51 | 19 | −1 | CTTAGTAACCACAGGTTGTGTCAC | TTTC | 75 |
| Human-Exon 51 | 20 | −1 | GAGATGGCAGTTTCCTTAGTAACC | TTTG | 76 |
| Human-Exon 51 | 21 | −1 | TAGTTTGGAGATGGCAGTTTCCTT | TTTC | 77 |
| Human-Exon 51 | 22 | −1 | TTCTCATACCTTCTGCTTGATGAT | TTTT | 78 |
| Human-Exon 51 | 23 | −1 | TCATTTTTTCTCATACCTTCTGCT | TTTA | 79 |
| Human-Exon 51 | 24 | −1 | ATCATTTTTTCTCATACCTTCTGC | TTTT | 80 |
| Human-Exon 51 | 25 | −1 | AAGAAAAACTTCTGCCAACTTTTA | TTTA | 81 |
| Human-Exon 51 | 26 | −1 | AAAGAAAAACTTCTGCCAACTTTT | TTTT | 82 |
| Human-Exon 51 | 27 | 1 | TCTTTAAAATGAAGATTTTCCACC | TTTT | 83 |
| Human-Exon 51 | 28 | 1 | CTTTAAAATGAAGATTTTCCACCA | TTTT | 84 |
| Human-Exon 51 | 29 | 1 | TTTAAAATGAAGATTTTCCACCAA | TTTC | 85 |
| Human-Exon 51 | 30 | 1 | AAATGAAGATTTTCCACCAATCAC | TTTA | 86 |
| Human-Exon 51 | 31 | 1 | CCACCAATCACTTTACTCTCCTAG | TTTT | 87 |
| Human-Exon 51 | 32 | 1 | CACCAATCACTTTACTCTCCTAGA | TTTC | 88 |
| Human-Exon 51 | 33 | 1 | CTCTCCTAGACCATTTCCCACCAG | TTTA | 89 |
| Human-Exon 45 | 1 | −1 | agaaaagattaaacagtgtgctac | tttg | 90 |
| Human-Exon 45 | 2 | −1 | tttgagaaaagattaaacagtgtg | TTTa | 91 |
| Human-Exon 45 | 3 | −1 | atttgagaaaagattaaacagtgt | TTTT | 92 |
| Human-Exon 45 | 4 | −1 | Tatttgagaaaagattaaacagtg | TTTT | 93 |
| Human-Exon 45 | 5 | 1 | atcttttctcaaatAAAAAGACAT | ttta | 94 |
| Human-Exon 45 | 6 | 1 | ctcaaatAAAAAGACATGGGGCTT | tttt | 95 |
| Human-Exon 45 | 7 | 1 | tcaaatAAAAAGACATGGGGCTTC | tttc | 96 |
| Human-Exon 45 | 8 | 1 | TGTTTTGCCTTTTTGGTATCTTAC | TTTT | 97 |
| Human-Exon 45 | 9 | 1 | GTTTTGCCTTTTTGGTATCTTACA | TTTT | 98 |
| Human-Exon 45 | 10 | 1 | TTTTGCCTTTTTGGTATCTTACAG | TTTG | 99 |
| Human-Exon 45 | 11 | 1 | GCCTTTTTGGTATCTTACAGGAAC | TTTT | 100 |
| Human-Exon 45 | 12 | 1 | CCTTTTTGGTATCTTACAGGAACT | TTTG | 101 |
| Human-Exon 45 | 13 | 1 | TGGTATCTTACAGGAACTCCAGGA | TTTT | 102 |
| Human-Exon 45 | 14 | 1 | GGTATCTTACAGGAACTCCAGGAT | TTTT | 103 |
| Human-Exon 45 | 15 | −1 | AGGATTGCTGAATTATTTCTTCCC | TTTG | 104 |
| Human-Exon 45 | 16 | −1 | GAGGATTGCTGAATTATTTCTTCC | TTTT | 105 |
| Human-Exon 45 | 17 | −1 | TGAGGATTGCTGAATTATTTCTTC | TTTT | 106 |
| Human-Exon 45 | 18 | −1 | CTGTAGAATACTGGCATCTGTTTT | TTTC | 107 |
| Human-Exon 45 | 19 | −1 | CCTGTAGAATACTGGCATCTGTTT | TTTT | 108 |
| Human-Exon 45 | 20 | −1 | TCCTGTAGAATACTGGCATCTGTT | TTTT | 109 |
| Human-Exon 45 | 21 | −1 | CAGACCTCCTGCCACCGCAGATTC | TTTG | 110 |
| Human-Exon 45 | 22 | −1 | TGTCTGACAGCTGTTTGCAGACCT | TTTC | 111 |
| Human-Exon 45 | 23 | −1 | CTGTCTGACAGCTGTTTGCAGACC | TTTT | 112 |
| Human-Exon 45 | 24 | −1 | TCTGTCTGACAGCTGTTTGCAGAC | TTTT | 113 |
| Human-Exon 45 | 25 | −1 | TTCTGTCTGACAGCTGTTTGCAGA | TTTT | 114 |
| Human-Exon 45 | 26 | −1 | ATTCCTATTAGATCTGTCGCCCTA | TTTC | 115 |
| Human-Exon 45 | 27 | −1 | CATTCCTATTAGATCTGTCGCCCT | TTTT | 116 |
| Human-Exon 45 | 28 | 1 | AGCAGACTTTTTAAGCTTTCTTTA | TTTT | 117 |
| Human-Exon 45 | 29 | 1 | GCAGACTTTTTAAGCTTTCTTTAG | TTTA | 118 |
| Human-Exon 45 | 30 | 1 | TAAGCTTTCTTTAGAAGAATATTT | TTTT | 119 |
| Human-Exon 45 | 31 | 1 | AAGCTTTCTTTAGAAGAATATTTC | TTTT | 120 |
| Human-Exon 45 | 32 | 1 | AGCTTTCTTTAGAAGAATATTTCA | TTTA | 121 |
| Human-Exon 45 | 33 | 1 | TTTAGAAGAATATTTCATGAGAGA | TTTC | 122 |
| Human-Exon 45 | 34 | 1 | GAAGAATATTTCATGAGAGATTAT | TTTA | 123 |
| Human-Exon 44 | 1 | 1 | TCAGTATAACCAAAAAATATACGC | TTTG | 124 |
| Human-Exon 44 | 2 | 1 | acataatccatctatttttcttga | tttt | 125 |
| Human-Exon 44 | 3 | 1 | cataatccatctatttttcttgat | ttta | 126 |
| Human-Exon 44 | 4 | 1 | tcttgatccatatgcttttACCTG | tttt | 127 |
| Human-Exon 44 | 5 | 1 | cttgatccatatgcttttACCTGC | tttt | 128 |
| Human-Exon 44 | 6 | 1 | ttgatccatatgcttttACCTGCA | tttc | 129 |
| Human-Exon 44 | 7 | −1 | TCAACAGATCTGTCAAATCGCCTG | TTTC | 130 |
| Human-Exon 44 | 8 | 1 | ACCTGCAGGCGATTTGACAGATCT | tttt | 131 |
| Human-Exon 44 | 9 | 1 | CCTGCAGGCGATTTGACAGATCTG | tttA | 132 |
| Human-Exon 44 | 10 | 1 | ACAGATCTGTTGAGAAATGGCGGC | TTTG | 133 |
| Human-Exon 44 | 11 | −1 | TATCATAATGAAAACGCCGCCATT | TTTA | 134 |
| Human-Exon 44 | 12 | 1 | CATTATGATATAAAGATATTTAAT | TTTT | 135 |
| Human-Exon 44 | 13 | −1 | TATTTAGCATGTTCCCAATTCTCA | TTTG | 136 |
| Human-Exon 44 | 14 | −1 | GAAAAAACAAATCAAAGACTTACC | TTTC | 137 |
| Human-Exon 44 | 15 | 1 | ATTTGTTTTTTCGAAATTGTATTT | TTTG | 138 |
| Human-Exon 44 | 16 | 1 | TTTTTTCGAAATTGTATTTATCTT | TTTG | 139 |
| Human-Exon 44 | 17 | 1 | TTCGAAATTGTATTTATCTTCAGC | TTTT | 140 |
| Human-Exon 44 | 18 | 1 | TCGAAATTGTATTTATCTTCAGCA | TTTT | 141 |
| Human-Exon 44 | 19 | 1 | CGAAATTGTATTTATCTTCAGCAC | TTTT | 142 |
| Human-Exon 44 | 20 | 1 | GAAATTGTATTTATCTTCAGCACA | TTTC | 143 |
| Human-Exon 44 | 21 | −1 | AGAAGTTAAAGAGTCCAGATGTGC | TTTA | 144 |
| Human-Exon 44 | 22 | 1 | TCTTCAGCACATCTGGACTCTTTA | TTTA | 145 |
| Human-Exon 44 | 23 | −1 | CATCACCCTTCAGAACCTGATCTT | TTTC | 146 |
| Human-Exon 44 | 24 | 1 | ACTTCTTAAAGATCAGGTTCTGAA | TTTA | 147 |
| Human-Exon 44 | 25 | 1 | GACTGTTGTTGTCATCATTATATT | TTTT | 148 |
| Human-Exon 44 | 26 | 1 | ACTGTTGTTGTCATCATTATATTA | TTTG | 149 |
| Human-Exon 53 | 1 | −1 | AACTAGAATAAAAGGAAAAATAAA | TTTC | 150 |
| Human-Exon 53 | 2 | 1 | CTACTATATATTTATTTTTCCTTT | TTTA | 151 |
| Human-Exon 53 | 3 | 1 | TTTTTCCTTTTATTCTAGTTGAAA | TTTA | 152 |
| Human-Exon 53 | 4 | 1 | TCCTTTTATTCTAGTTGAAAGAAT | TTTT | 153 |
| Human-Exon 53 | 5 | 1 | CCTTTTATTCTAGTTGAAAGAATT | TTTT | 154 |
| Human-Exon 53 | 6 | 1 | CTTTTATTCTAGTTGAAAGAATTC | TTTC | 155 |
| Human-Exon 53 | 7 | 1 | ATTCTAGTTGAAAGAATTCAGAAT | TTTT | 156 |
| Human-Exon 53 | 8 | 1 | TTCTAGTTGAAAGAATTCAGAATC | TTTA | 157 |
| Human-Exon 53 | 9 | −1 | ATTCAACTGTTGCCTCCGGTTCTG | TTTC | 158 |
| Human-Exon 53 | 10 | −1 | ACATTTCATTCAACTGTTGCCTCC | TTTA | 159 |
| Human-Exon 53 | 11 | −1 | CTTTTGGATTGCATCTACTGTATA | TTTT | 160 |
| Human-Exon 53 | 12 | −1 | TGTGATTTTCTTTTGGATTGCATC | TTTC | 161 |
| Human-Exon 53 | 13 | −1 | ATACTAACCTTGGTTTCTGTGATT | TTTG | 162 |
| Human-Exon 53 | 14 | −1 | AAAAGGTATCTTTGATACTAACCT | TTTA | 163 |
| Human-Exon 53 | 15 | −1 | AAAAAGGTATCTTTGATACTAACC | TTTT | 164 |
| Human-Exon 53 | 16 | −1 | TTTTAAAAAGGTATCTTTGATACT | TTTA | 165 |
| Human-Exon 53 | 17 | −1 | ATTTTAAAAAGGTATCTTTGATAC | TTTT | 166 |
| Human-Exon 46 | 1 | −1 | TTAATGCAAACTGGGACACAAACA | TTTG | 167 |
| Human-Exon 46 | 2 | 1 | TAAATTGCCATGTTTGTGTCCCAG | TTTT | 168 |
| Human-Exon 46 | 3 | 1 | AAATTGCCATGTTTGTGTCCCAGT | TTTT | 169 |
| Human-Exon 46 | 4 | 1 | AATTGCCATGTTTGTGTCCCAGTT | TTTA | 170 |
| Human-Exon 46 | 5 | 1 | TGTCCCAGTTTGCATTAACAAATA | TTTG | 171 |
| Human-Exon 46 | 6 | −1 | CAACATAGTTCTCAAACTATTTGT | tttC | 172 |
| Human-Exon 46 | 7 | −1 | CCAACATAGTTCTCAAACTATTTG | tttt | 173 |
| Human-Exon 46 | 8 | −1 | tCCAACATAGTTCTCAAACTATTT | tttt | 174 |
| Human-Exon 46 | 9 | −1 | tttCCAACATAGTTCTCAAACTAT | tttt | 175 |
| Human-Exon 46 | 10 | −1 | ttttCCAACATAGTTCTCAAACTA | tttt | 176 |
| Human-Exon 46 | 11 | −1 | tttttCCAACATAGTTCTCAAACT | tttt | 177 |
| Human-Exon 46 | 12 | 1 | CATTAACAAATAGTTTGAGAACTA | TTTG | 178 |
| Human-Exon 46 | 13 | 1 | AGAACTATGTTGGaaaaaaaaaTA | TTTG | 179 |
| Human-Exon 46 | 14 | −1 | GTTCTTCTAGCCTGGAGAAAGAAG | TTTT | 180 |
| Human-Exon 46 | 15 | 1 | ATTCTTCTTTCTCCAGGCTAGAAG | TTTT | 181 |
| Human-Exon 46 | 16 | 1 | TTCTTCTTTCTCCAGGCTAGAAGA | TTTA | 182 |
| Human-Exon 46 | 17 | 1 | TCCAGGCTAGAAGAACAAAAGAAT | TTTC | 183 |
| Human-Exon 46 | 18 | −1 | AAATTCTGACAAGATATTCTTTTG | TTTG | 184 |
| Human-Exon 46 | 19 | −1 | CTTTTAGTTGCTGCTCTTTTCCAG | TTTT | 185 |
| Human-Exon 46 | 20 | −1 | AGAAAATAAAATTACCTTGACTTG | TTTG | 186 |
| Human-Exon 46 | 21 | −1 | TGCAAGCAGGCCCTGGGGGATTTG | TTTA | 187 |
| Human-Exon 46 | 22 | 1 | ATTTTCTCAAATCCCCCAGGGCCT | TTTT | 188 |
| Human-Exon 46 | 23 | 1 | TTTTCTCAAATCCCCCAGGGCCTG | TTTA | 189 |
| Human-Exon 46 | 24 | 1 | CTCAAATCCCCCAGGGCCTGCTTG | TTTT | 190 |
| Human-Exon 46 | 25 | 1 | TCAAATCCCCCAGGGCCTGCTTGC | TTTC | 191 |
| Human-Exon 46 | 26 | 1 | TTAATTCAATCATTGGTTTTCTGC | TTTT | 192 |
| Human-Exon 46 | 27 | 1 | TAATTCAATCATTGGTTTTCTGCC | TTTT | 193 |
| Human-Exon 46 | 28 | 1 | AATTCAATCATTGGTTTTCTGCCC | TTTT | 194 |
| Human-Exon 46 | 29 | 1 | ATTCAATCATTGGTTTTCTGCCCA | TTTA | 195 |
| Human-Exon 46 | 30 | −1 | GCAAGGAACTATGAATAACCTAAT | TTTA | 196 |
| Human-Exon 46 | 31 | 1 | CTGCCCATTAGGTTATTCATAGTT | TTTT | 197 |
| Human-Exon 46 | 32 | 1 | TGCCCATTAGGTTATTCATAGTTC | TTTC | 198 |
| Human-Exon 52 | 1 | −1 | TAGAAAACAATTTAACAGGAAATA | TTTA | 199 |
| Human-Exon 52 | 2 | 1 | CTGTTAAATTGTTTTCTATAAACC | TTTC | 200 |
| Human-Exon 52 | 3 | −1 | GAAATAAAAAAGATGTTACTGTAT | TTTA | 201 |
| Human-Exon 52 | 4 | −1 | AGAAATAAAAAAGATGTTACTGTA | TTTT | 202 |
| Human-Exon 52 | 5 | 1 | CTATAAACCCTTATACAGTAACAT | TTTT | 203 |
| Human-Exon 52 | 6 | 1 | TATAAACCCTTATACAGTAACATC | TTTC | 204 |
| Human-Exon 52 | 7 | 1 | TTATTTCTAAAAGTGTTTTGGCTG | TTTT | 205 |
| Human-Exon 52 | 8 | 1 | TATTTCTAAAAGTGTTTTGGCTGG | TTTT | 206 |
| Human-Exon 52 | 9 | 1 | ATTTCTAAAAGTGTTTTGGCTGGT | TTTT | 207 |
| Human-Exon 52 | 10 | 1 | TTTCTAAAAGTGTTTTGGCTGGTC | TTTA | 208 |
| Human-Exon 52 | 11 | 1 | TAAAAGTGTTTTGGCTGGTCTCAC | TTTC | 209 |
| Human-Exon 52 | 12 | −1 | CATAATACAAAGTAAAGTACAATT | TTTA | 210 |
| Human-Exon 52 | 13 | −1 | ACATAATACAAAGTAAAGTACAAT | TTTT | 211 |
| Human-Exon 52 | 14 | 1 | GGCTGGTCTCACAATTGTACTTTA | TTTT | 212 |
| Human-Exon 52 | 15 | 1 | GCTGGTCTCACAATTGTACTTTAC | TTTG | 213 |
| Human-Exon 52 | 16 | 1 | CTTTGTATTATGTAAAAGGAATAC | TTTA | 214 |
| Human-Exon 52 | 17 | 1 | TATTATGTAAAAGGAATACACAAC | TTTG | 215 |
| Human-Exon 52 | 18 | 1 | TTCTTACAGGCAACAATGCAGGAT | TTTG | 216 |
| Human-Exon 52 | 19 | 1 | GAACAGAGGCGTCCCCAGTTGGAA | TTTG | 217 |
| Human-Exon 52 | 20 | −1 | GGCAGCGGTAATGAGTTCTTCCAA | TTTG | 218 |
| Human-Exon 52 | 21 | −1 | TCAAATTTTGGGCAGCGGTAATGA | TTTT | 219 |
| Human-Exon 52 | 22 | 1 | AAAAACAAGACCAGCAATCAAGAG | TTTG | 220 |
| Human-Exon 52 | 23 | −1 | TGTGTCCCATGCTTGTTAAAAAAC | TTTG | 221 |
| Human-Exon 52 | 24 | 1 | TTAACAAGCATGGGACACACAAAG | TTTT | 222 |
| Human-Exon 52 | 25 | 1 | TAACAAGCATGGGACACACAAAGC | TTTT | 223 |
| Human-Exon 52 | 26 | 1 | AACAAGCATGGGACACACAAAGCA | TTTT | 224 |
| Human-Exon 52 | 27 | 1 | ACAAGCATGGGACACACAAAGCAA | TTTA | 225 |
| Human-Exon 52 | 28 | −1 | TTGAAACTTGTCATGCATCTTGCT | TTTA | 226 |
| Human-Exon 52 | 29 | −1 | ATTGAAACTTGTCATGCATCTTGC | TTTT | 227 |
| Human-Exon 52 | 30 | −1 | TATTGAAACTTGTCATGCATCTTG | TTTT | 228 |
| Human-Exon 52 | 31 | 1 | AATAAAAACTTAAGTTCATATATC | TTTC | 229 |
| Human-Exon 50 | 1 | −1 | GTGAATATATTATTGGATTTCTAT | TTTG | 230 |
| Human-Exon 50 | 2 | −1 | AAGATAATTCATGAACATCTTAAT | TTTG | 231 |
| Human-Exon 50 | 3 | −1 | ACAGAAAAGCATACACATTACTTA | TTTA | 232 |
| Human-Exon 50 | 4 | 1 | CTGTTAAAGAGGAAGTTAGAAGAT | TTTT | 233 |
| Human-Exon 50 | 5 | 1 | TGTTAAAGAGGAAGTTAGAAGATC | TTTC | 234 |
| Human-Exon 50 | 6 | −1 | CCGCCTTCCACTCAGAGCTCAGAT | TTTA | 235 |
| Human-Exon 50 | 7 | −1 | CCCTCAGCTCTTGAAGTAAACGGT | TTTG | 236 |
| Human-Exon 50 | 8 | 1 | CTTCAAGAGCTGAGGGCAAAGCAG | TTTA | 237 |
| Human-Exon 50 | 9 | −1 | AACAAATAGCTAGAGCCAAAGAGA | TTTG | 238 |
| Human-Exon 50 | 10 | −1 | GAACAAATAGCTAGAGCCAAAGAG | TTTT | 239 |
| Human-Exon 50 | 11 | 1 | GCTCTAGCTATTTGTTCAAAAGTG | TTTG | 240 |
| Human-Exon 50 | 12 | 1 | TTCAAAAGTGCAACTATGAAGTGA | TTTG | 241 |
| Human-Exon 50 | 13 | −1 | TCTCTCACCCAGTCATCACTTCAT | TTTC | 242 |
| Human-Exon 50 | 14 | −1 | CTCTCTCACCCAGTCATCACTTCA | TTTT | 243 |
| Human-Exon 43 | 1 | 1 | tatatatatatatatTTTTCTCTT | TTTG | 244 |
| Human-Exon 43 | 2 | 1 | TCTCTTTCTATAGACAGCTAATTC | tTTT | 245 |
| Human-Exon 43 | 3 | 1 | CTCTTTCTATAGACAGCTAATTCA | TTTT | 246 |
| Human-Exon 43 | 4 | −1 | AAACAGTAAAAAAATGAATTAGCT | TTTA | 247 |
| Human-Exon 43 | 5 | 1 | TCTTTCTATAGACAGCTAATTCAT | TTTC | 248 |
| Human-Exon 43 | 6 | −1 | AAAACAGTAAAAAAATGAATTAGC | TTTT | 249 |
| Human-Exon 43 | 7 | 1 | TATAGACAGCTAATTCATTTTTTT | TTTC | 250 |
| Human-Exon 43 | 8 | −1 | TATTCTGTAATATAAAAATTTTAA | TTTA | 251 |
| Human-Exon 43 | 9 | −1 | ATATTCTGTAATATAAAAATTTTA | TTTT | 252 |
| Human-Exon 43 | 10 | 1 | TTTACTGTTTTAAAATTTTTATAT | TTTT | 253 |
| Human-Exon 43 | 11 | 1 | TTACTGTTTTAAAATTTTTATATT | TTTT | 254 |
| Human-Exon 43 | 12 | 1 | TACTGTTTTAAAATTTTTATATTA | TTTT | 255 |
| Human-Exon 43 | 13 | 1 | ACTGTTTTAAAATTTTTATATTAC | TTTT | 256 |
| Human-Exon 43 | 14 | 1 | CTGTTTTAAAATTTTTATATTACA | TTTA | 257 |
| Human-Exon 43 | 15 | 1 | AAAATTTTTATATTACAGAATATA | TTTT | 258 |
| Human-Exon 43 | 16 | 1 | AAATTTTTATATTACAGAATATAA | TTTA | 259 |
| Human-Exon 43 | 17 | −1 | TTGTAGACTATCTTTTATATTCTG | TTTG | 260 |
| Human-Exon 43 | 18 | 1 | TATATTACAGAATATAAAAGATAG | TTTT | 261 |
| Human-Exon 43 | 19 | 1 | ATATTACAGAATATAAAAGATAGT | TTTT | 262 |
| Human-Exon 43 | 20 | 1 | TATTACAGAATATAAAAGATAGTC | TTTA | 263 |
| Human-Exon 43 | 21 | −1 | CAATGCTGCTGTCTTCTTGCTATG | TTTG | 264 |
| Human-Exon 43 | 22 | 1 | CAATGGGAAAAAGTTAACAAAATG | TTTC | 265 |
| Human-Exon 43 | 23 | −1 | TGCAAGTATCAAGAAAAATATATG | TTTC | 266 |
| Human-Exon 43 | 24 | 1 | TCTTGATACTTGCAGAAATGATTT | TTTT | 267 |
| Human-Exon 43 | 25 | 1 | CTTGATACTTGCAGAAATGATTTG | TTTT | 268 |
| Human-Exon 43 | 26 | 1 | TTGATACTTGCAGAAATGATTTGT | TTTC | 269 |
| Human-Exon 43 | 27 | 1 | TTTTCAGGGAACTGTAGAATTTAT | TTTG | 270 |
| Human-Exon 43 | 28 | −1 | CATGGAGGGTACTGAAATAAATTC | TTTC | 271 |
| Human-Exon 43 | 29 | −1 | CCATGGAGGGTACTGAAATAAATT | TTTT | 272 |
| Human-Exon 43 | 30 | 1 | CAGGGAACTGTAGAATTTATTTCA | TTTT | 273 |
| Human-Exon 43 | 31 | −1 | TCCATGGAGGGTACTGAAATAAAT | TTTT | 274 |
| Human-Exon 43 | 32 | 1 | AGGGAACTGTAGAATTTATTTCAG | TTTC | 275 |
| Human-Exon 43 | 33 | −1 | TTCCATGGAGGGTACTGAAATAAA | TTTT | 276 |
| Human-Exon 43 | 34 | −1 | CCTGTCTTTTTTCCATGGAGGGTA | TTTC | 277 |
| Human-Exon 43 | 35 | −1 | CCCTGTCTTTTTTCCATGGAGGGT | TTTT | 278 |
| Human-Exon 43 | 36 | −1 | TCCCTGTCTTTTTTCCATGGAGGG | TTTT | 279 |
| Human-Exon 43 | 37 | 1 | TTTCAGTACCCTCCATGGAAAAAA | TTTA | 280 |
| Human-Exon 43 | 38 | 1 | AGTACCCTCCATGGAAAAAAGACA | TTTC | 281 |
| Human-Exon 6 | 1 | 1 | AGTTTGCATGGTTCTTGCTCAAGG | TTTA | 282 |
| Human-Exon 6 | 2 | −1 | ATAAGAAAATGCATTCCTTGAGCA | TTTC | 283 |
| Human-Exon 6 | 3 | −1 | CATAAGAAAATGCATTCCTTGAGC | TTTT | 284 |
| Human-Exon 6 | 4 | 1 | CATGGTTCTTGCTCAAGGAATGCA | TTTG | 285 |
| Human-Exon 6 | 5 | −1 | ACCTACATGTGGAAATAAATTTTC | TTTG | 286 |
| Human-Exon 6 | 6 | −1 | GACCTACATGTGGAAATAAATTTT | TTTT | 287 |
| Human-Exon 6 | 7 | −1 | TGACCTACATGTGGAAATAAATTT | TTTT | 288 |
| Human-Exon 6 | 8 | 1 | CTTATGAAAATTTATTTCCACATG | TTTT | 289 |
| Human-Exon 6 | 9 | 1 | TTATGAAAATTTATTTCCACATGT | TTTC | 290 |
| Human-Exon 6 | 10 | −1 | ATTACATTTTTGACCTACATGTGG | TTTC | 291 |
| Human-Exon 6 | 11 | −1 | CATTACATTTTTGACCTACATGTG | TTTT | 292 |
| Human-Exon 6 | 12 | −1 | TCATTACATTTTTGACCTACATGT | TTTT | 293 |
| Human-Exon 6 | 13 | 1 | TTTCCACATGTAGGTCAAAAATGT | TTTA | 294 |
| Human-Exon 6 | 14 | 1 | CACATGTAGGTCAAAAATGTAATG | TTTC | 295 |
| Human-Exon 6 | 15 | −1 | TTGCAATCCAGCCATGATATTTTT | TTTG | 296 |
| Human-Exon 6 | 16 | −1 | ACTGTTGGTTTGTTGCAATCCAGC | TTTC | 297 |
| Human-Exon 6 | 17 | −1 | CACTGTTGGTTTGTTGCAATCCAG | TTTT | 298 |
| Human-Exon 6 | 18 | 1 | AATGCTCTCATCCATAGTCATAGG | TTTG | 299 |
| Human-Exon 6 | 19 | −1 | ATGTCTCAGTAATCTTCTTACCTA | TTTA | 300 |
| Human-Exon 6 | 20 | −1 | CAAGTTATTTAATGTCTCAGTAAT | TTTA | 301 |
| Human-Exon 6 | 21 | −1 | ACAAGTTATTTAATGTCTCAGTAA | TTTT | 302 |
| Human-Exon 6 | 22 | 1 | GACTCTGATGACATATTTTTCCCC | TTTA | 303 |
| Human-Exon 6 | 23 | 1 | TCCCCAGTATGGTTCCAGATCATG | TTTT | 304 |
| Human-Exon 6 | 24 | 1 | CCCCAGTATGGTTCCAGATCATGT | TTTT | 305 |
| Human-Exon 6 | 25 | 1 | CCCAGTATGGTTCCAGATCATGTC | TTTC | 306 |
| Human-Exon 7 | 1 | 1 | TATTTGTCTTtgtgtatgtgtgta | TTTA | 307 |
| Human-Exon 7 | 2 | 1 | TCTTtgtgtatgtgtgtatgtgta | TTTG | 308 |
| Human-Exon 7 | 3 | 1 | tgtatgtgtgtatgtgtatgtgtt | TTtg | 309 |
| Human-Exon 7 | 4 | 1 | AGGCCAGACCTATTTGACTGGAAT | ttTT | 310 |
| Human-Exon 7 | 5 | 1 | GGCCAGACCTATTTGACTGGAATA | tTTA | 311 |
| Human-Exon 7 | 6 | 1 | ACTGGAATAGTGTGGTTTGCCAGC | TTTG | 312 |
| Human-Exon 7 | 7 | 1 | CCAGCAGTCAGCCACACAACGACT | TTTG | 313 |
| Human-Exon 7 | 8 | −1 | TCTATGCCTAATTGATATCTGGCG | TTTC | 314 |
| Human-Exon 7 | 9 | −1 | CCAACCTTCAGGATCGAGTAGTTT | TTTA | 315 |
| Human-Exon 7 | 10 | 1 | TGGACTACCACTGCTTTTAGTATG | TTTC | 316 |
| Human-Exon 7 | 11 | 1 | AGTATGGTAGAGTTTAATGTTTTC | TTTT | 317 |
| Human-Exon 7 | 12 | 1 | GTATGGTAGAGTTTAATGTTTTCA | TTTA | 318 |
| Human-Exon 8 | 1 | −1 | AGACTCTAAAAGGATAATGAACAA | TTTG | 319 |
| Human-Exon 8 | 2 | 1 | ACTTTGATTTGTTCATTATCCTTT | TTTA | 320 |
| Human-Exon 8 | 3 | −1 | TATATTTGAGACTCTAAAAGGATA | TTTC | 321 |
| Human-Exon 8 | 4 | 1 | ATTTGTTCATTATCCTTTTAGAGT | TTTG | 322 |
| Human-Exon 8 | 5 | −1 | GTTTCTATATTTGAGACTCTAAAA | TTTG | 323 |
| Human-Exon 8 | 6 | −1 | GGTTTCTATATTTGAGACTCTAAA | TTTT | 324 |
| Human-Exon 8 | 7 | −1 | TGGTTTCTATATTTGAGACTCTAA | TTTT | 325 |
| Human-Exon 8 | 8 | 1 | TTCATTATCCTTTTAGAGTCTCAA | TTTG | 326 |
| Human-Exon 8 | 9 | 1 | AGAGTCTCAAATATAGAAACCAAA | TTTT | 327 |
| Human-Exon 8 | 10 | 1 | GAGTCTCAAATATAGAAACCAAAA | TTTA | 328 |
| Human-Exon 8 | 11 | −1 | CACTTCCTGGATGGCTTCAATGCT | TTTC | 329 |
| Human-Exon 8 | 12 | 1 | GCCTCAACAAGTGAGCATTGAAGC | TTTT | 330 |
| Human-Exon 8 | 13 | 1 | CCTCAACAAGTGAGCATTGAAGCC | TTTG | 331 |
| Human-Exon 8 | 14 | −1 | GGTGGCCTTGGCAACATTTCCACT | TTTA | 332 |
| Human-Exon 8 | 15 | −1 | GTCACTTTAGGTGGCCTTGGCAAC | TTTA | 333 |
| Human-Exon 8 | 16 | −1 | ATGATGTAACTGAAAATGTTCTTC | TTTG | 334 |
| Human-Exon 8 | 17 | −1 | CCTGTTGAGAATAGTGCATTTGAT | TTTA | 335 |
| Human-Exon 8 | 18 | 1 | CAGTTACATCATCAAATGCACTAT | TTTT | 336 |
| Human-Exon 8 | 19 | 1 | AGTTACATCATCAAATGCACTATT | TTTC | 337 |
| Human-Exon 8 | 20 | −1 | CACACTTTACCTGTTGAGAATAGT | TTTA | 338 |
| Human-Exon 8 | 21 | 1 | CTGTTTTATATGCATTTTTAGGTA | TTTT | 339 |
| Human-Exon 8 | 22 | 1 | TGTTTTATATGCATTTTTAGGTAT | TTTC | 340 |
| Human-Exon 8 | 23 | 1 | ATATGCATTTTTAGGTATTACGTG | TTTT | 341 |
| Human-Exon 8 | 24 | 1 | TATGCATTTTTAGGTATTACGTGC | TTTA | 342 |
| Human-Exon 8 | 25 | 1 | TAGGTATTACGTGCACatatatat | TTTT | 343 |
| Human-Exon 8 | 26 | 1 | AGGTATTACGTGCACatatatata | TTTT | 344 |
| Human-Exon 8 | 27 | 1 | GGTATTACGTGCACatatatatat | TTTA | 345 |
| Human-Exon 55 | 1 | −1 | AGCAACAACTATAATATTGTGCAG | TTTA | 346 |
| Human-Exon 55 | 2 | 1 | GTTCCTCCATCTTTCTCTTTTTAT | TTTA | 347 |
| Human-Exon 55 | 3 | 1 | TCTTTTTATGGAGTTCACTAGGTG | TTTC | 348 |
| Human-Exon 55 | 4 | 1 | TATGGAGTTCACTAGGTGCACCAT | TTTT | 349 |
| Human-Exon 55 | 5 | 1 | ATGGAGTTCACTAGGTGCACCATT | TTTT | 350 |
| Human-Exon 55 | 6 | 1 | TGGAGTTCACTAGGTGCACCATTC | TTTA | 351 |
| Human-Exon 55 | 7 | 1 | ATAATTGCATCTGAACATTTGGTC | TTTA | 352 |
| Human-Exon 55 | 8 | 1 | GTCCTTTGCAGGGTGAGTGAGCGA | TTTG | 353 |
| Human-Exon 55 | 9 | −1 | TTCCAAAGCAGCCTCTCGCTCACT | TTTC | 354 |
| Human-Exon 55 | 10 | 1 | CAGGGTGAGTGAGCGAGAGGCTGC | TTTG | 355 |
| Human-Exon 55 | 11 | 1 | GAAGAAACTCATAGATTACTGCAA | TTTG | 356 |
| Human-Exon 55 | 12 | −1 | CAGGTCCAGGGGGAACTGTTGCAG | TTTC | 357 |
| Human-Exon 55 | 13 | −1 | CCAGGTCCAGGGGGAACTGTTGCA | TTTT | 358 |
| Human-Exon 55 | 14 | −1 | AGCTTCTGTAAGCCAGGCAAGAAA | TTTC | 359 |
| Human-Exon 55 | 15 | 1 | TTGCCTGGCTTACAGAAGCTGAAA | TTTC | 360 |
| Human-Exon 55 | 16 | −1 | CTTACGGGTAGCATCCTGTAGGAC | TTTC | 361 |
| Human-Exon 55 | 17 | −1 | CTCCCTTGGAGTCTTCTAGGAGCC | TTTA | 362 |
| Human-Exon 55 | 18 | −1 | ACTCCCTTGGAGTCTTCTAGGAGC | TTTT | 363 |
| Human-Exon 55 | 19 | −1 | ATCAGCTCTTTTACTCCCTTGGAG | TTTC | 364 |
| Human-Exon 55 | 20 | 1 | CGCTTTAGCACTCTTGTGGATCCA | TTTC | 365 |
| Human-Exon 55 | 21 | 1 | GCACTCTTGTGGATCCAATTGAAC | TTTA | 366 |
| Human-Exon 55 | 22 | −1 | TCCCTGGCTTGTCAGTTACAAGTA | TTTG | 367 |
| Human-Exon 55 | 23 | −1 | GTCCCTGGCTTGTCAGTTACAAGT | TTTT | 368 |
| Human-Exon 55 | 24 | −1 | TTTTGTCCCTGGCTTGTCAGTTAC | TTTG | 369 |
| Human-Exon 55 | 25 | −1 | GTTTTGTCCCTGGCTTGTCAGTTA | TTTT | 370 |
| Human-Exon 55 | 26 | 1 | TACTTGTAACTGACAAGCCAGGGA | TTTG | 371 |
| Human-G1-exon51 | | 1 | gCTCCTACTCAGACTGTTACTCTG | TTTA | 372 |
| Human-G2-exon51 | | 1 | taccatgtattgctaaacaaagta | TTTC | 373 |
| Human-G3-exon51 | | −1 | attgaagagtaacaatttgagcca | TTTA | 374 |
| mouse-Exon23-G1 | | 1 | aggctctgcaaagttctTTGAAAG | TTTG | 375 |
| mouse-Exon23-G2 | | 1 | AAAGAGCAACAAAATGGCttcaac | TTTG | 376 |
| mouse-Exon23-G3 | | 1 | AAAGAGCAATAAAATGGCttcaac | TTTG | 377 |
| mouse-Exon23-G4 | | −1 | AAAGAACTTTGCAGAGCctcaaaa | TTTC | 378 |
| mouse-Exon23-G5 | | −1 | ctgaatatctatgcattaataact | TTTA | 379 |
| mouse-Exon23-G6 | | −1 | tattatattacagggcatattata | TTTC | 380 |
| mouse-Exon23-G7 | | 1 | Aggtaagccgaggtttggccttta | TTTC | 381 |
| mouse-Exon23-G8 | | 1 | cccagagtccttcaaagatattga | TTTA | 382 |

*In this table, upper case letters represent nucleotides that align to the exon sequence of the gene. Lower case letters represent nucleotides that align to the intron sequence of the gene.

TABLE E
gRNA sequences

| Targeted gRNA | Guide | | | | SEQ ID |
|---|---|---|---|---|---|
| Exon | # | Strand | gRNA sequence* | PAM | NO. |
| Human-Exon 51 | 4 | 1 | aaaaaggaaaaaagaagaaaaaga | tttt | 448 |
| Human-Exon 51 | 5 | 1 | Caaaaaggaaaaaagaagaaaaag | tttt | 449 |
| Human-Exon 51 | 6 | 1 | GCaaaaaggaaaaaagaagaaaaa | tttc | 450 |
| Human-Exon 51 | 7 | 1 | UUUUGCaaaaaggaaaaaagaaga | tttt | 451 |
| Human-Exon 51 | 8 | 1 | UUUUUGCaaaaaggaaaaaagaag | tttt | 452 |
| Human-Exon 51 | 9 | 1 | GUUUUUGCaaaaaggaaaaaagaa | tttc | 453 |
| Human-Exon 51 | 10 | 1 | AUUUUGGGUUUUUGCaaaaaggaa | tttt | 454 |
| Human-Exon 51 | 11 | 1 | UAUUUUGGGUUUUUGCaaaaagga | tttt | 455 |
| Human-Exon 51 | 12 | 1 | AUAUUUUGGGUUUUUGCaaaaagg | tttt | 456 |
| Human-Exon 51 | 13 | 1 | AAUAUUUUGGGUUUUUGCaaaaag | tttc | 457 |
| Human-Exon 51 | 14 | 1 | GCUAAAAUAUUUUGGGUUUUUGCa | tttt | 458 |
| Human-Exon 51 | 15 | 1 | AGCUAAAAUAUUUUGGGUUUUUGC | tttt | 459 |
| Human-Exon 51 | 16 | 1 | GAGCUAAAAUAUUUUGGGUUUUUG | tttG | 460 |
| Human-Exon 51 | 17 | 1 | AGAGUAACAGUCUGAGUAGGAGCU | TTTT | 461 |
| Human-Exon 51 | 18 | 1 | CAGAGUAACAGUCUGAGUAGGAGC | TTTA | 462 |
| Human-Exon 51 | 19 | −1 | GUGACACAACCUGUGGUUACUAAG | TTTC | 463 |
| Human-Exon 51 | 20 | −1 | GGUUACUAAGGAAACUGCCAUCU | TTTG | 464 |
| Human-Exon 51 | 21 | −1 | AAGGAAACUGCCAUCUCCAAACUA | TTTC | 465 |
| Human-Exon 51 | 22 | −1 | AUCAUCAAGCAGAAGGUAUGAGAA | TTTT | 466 |
| Human-Exon 51 | 23 | −1 | AGCAGAAGGUAUGAGAAAAAAUGA | TTTA | 467 |
| Human-Exon 51 | 24 | −1 | GCAGAAGGUAUGAGAAAAAAUGAU | TTTT | 468 |
| Human-Exon 51 | 25 | −1 | UAAAAGUUGGCAGAAGUUUUUCUU | TTTA | 469 |
| Human-Exon 51 | 26 | −1 | AAAAGUUGGCAGAAGUUUUUCUUU | TTTT | 470 |
| Human-Exon 51 | 27 | 1 | GGUGGAAAAUCUUCAUUUUAAAGA | TTTT | 471 |
| Human-Exon 51 | 28 | 1 | UGGUGGAAAAUCUUCAUUUUAAAG | TTTT | 472 |
| Human-Exon 51 | 29 | 1 | UUGGUGGAAAAUCUUCAUUUUAAA | TTTC | 473 |
| Human-Exon 51 | 30 | 1 | GUGAUUGGUGGAAAAUCUUCAUUU | TTTA | 474 |
| Human-Exon 51 | 31 | 1 | CUAGGAGAGUAAAGUGAUUGGUGG | TTTT | 475 |
| Human-Exon 51 | 32 | 1 | UCUAGGAGAGUAAAGUGAUUGGUG | TTTC | 476 |
| Human-Exon 51 | 33 | 1 | CUGGUGGGAAAUGGUCUAGGAGA | TTTA | 477 |
| Human-Exon 45 | 1 | −1 | guagcacacuguuuaaucuuuucu | tttg | 478 |
| Human-Exon 45 | 2 | −1 | cacacuguuuaaucuuuucucaaa | TTTa | 479 |
| Human-Exon 45 | 3 | −1 | acacuguuuaaucuuuucucaaau | TTTT | 480 |
| Human-Exon 45 | 4 | −1 | cacuguuuaaucuuuucucaaauA | TTTT | 481 |
| Human-Exon 45 | 5 | 1 | AUGUCUUUUUauuugagaaaagau | ttta | 482 |
| Human-Exon 45 | 6 | 1 | AAGCCCCAUGUCUUUUUauuugag | tttt | 483 |
| Human-Exon 45 | 7 | 1 | GAAGCCCCAUGUCUUUUUauuuga | tttc | 484 |
| Human-Exon 45 | 8 | 1 | GUAAGAUACCAAAAAGGCAAAACA | TTTT | 485 |
| Human-Exon 45 | 9 | 1 | UGUAAGAUACCAAAAAGGCAAAAC | TTTT | 486 |
| Human-Exon 45 | 10 | 1 | CUGUAAGAUACCAAAAAGGCAAAA | TTTG | 487 |
| Human-Exon 45 | 11 | 1 | GUUCCUGUAAGAUACCAAAAAGGC | TTTT | 488 |
| Human-Exon 45 | 12 | 1 | AGUUCCUGUAAGAUACCAAAAAGG | TTTG | 489 |
| Human-Exon 45 | 13 | 1 | UCCUGGAGUUCCUGUAAGAUACCA | TTTT | 490 |
| Human-Exon 45 | 14 | 1 | AUCCUGGAGUUCCUGUAAGAUACC | TTTT | 491 |
| Human-Exon 45 | 15 | −1 | GGGAAGAAAUAAUUCAGCAAUCCU | TTTG | 492 |
| Human-Exon 45 | 16 | −1 | GGAAGAAAUAAUUCAGCAAUCCUC | TTTT | 493 |
| Human-Exon 45 | 17 | −1 | GAAGAAAUAAUUCAGCAAUCCUCA | TTTT | 494 |
| Human-Exon 45 | 18 | −1 | AAAACAGAUGCCAGUAUUCUACAG | TTTC | 495 |
| Human-Exon 45 | 19 | −1 | AAACAGAUGCCAGUAUUCUACAGG | TTTT | 496 |
| Human-Exon 45 | 20 | −1 | AACAGAUGCCAGUAUUCUACAGGA | TTTT | 497 |
| Human-Exon 45 | 21 | −1 | GAAUCUGCGGUGGCAGGAGGUCUG | TTTG | 498 |
| Human-Exon 45 | 22 | −1 | AGGUCUGCAAACAGCUGUCAGACA | TTTC | 499 |
| Human-Exon 45 | 23 | −1 | GGUCUGCAAACAGCUGUCAGACAG | TTTT | 500 |
| Human-Exon 45 | 24 | −1 | GUCUGCAAACAGCUGUCAGACAGA | TTTT | 501 |
| Human-Exon 45 | 25 | −1 | UCUGCAAACAGCUGUCAGACAGAA | TTTT | 502 |
| Human-Exon 45 | 26 | −1 | UAGGGCGACAGAUCUAAUAGGAAU | TTTC | 503 |
| Human-Exon 45 | 27 | −1 | AGGGCGACAGAUCUAAUAGGAAUG | TTTT | 504 |
| Human-Exon 45 | 28 | 1 | UAAAGAAAGCUUAAAAAGUCUGCU | TTTT | 505 |
| Human-Exon 45 | 29 | 1 | CUAAAGAAAGCUUAAAAAGUCUGC | TTTA | 506 |
| Human-Exon 45 | 30 | 1 | AAAUAUUCUUCUAAAGAAAGCUUA | TTTT | 507 |
| Human-Exon 45 | 31 | 1 | GAAAUAUUCUUCUAAAGAAAGCUU | TTTT | 508 |
| Human-Exon 45 | 32 | 1 | UGAAAUAUUCUUCUAAAGAAAGCU | TTTA | 509 |
| Human-Exon 45 | 33 | 1 | UCUCUCAUGAAAUAUUCUUCUAAA | TTTC | 510 |
| Human-Exon 45 | 34 | 1 | AUAAUCUCUCAUGAAAUAUUCUUC | TTTA | 511 |
| Human-Exon 44 | 1 | 1 | GCGUAUAUUUUUUGGUUAUACUGA | TTTG | 512 |
| Human-Exon 44 | 2 | 1 | ucaagaaaaauagauggauuaugu | tttt | 513 |
| Human-Exon 44 | 3 | 1 | aucaagaaaaauagauggauuaug | ttta | 514 |
| Human-Exon 44 | 4 | 1 | CAGGUaaaagcauauggaucaaga | tttt | 515 |
| Human-Exon 44 | 5 | 1 | GCAGGUaaaagcauauggaucaag | tttt | 516 |
| Human-Exon 44 | 6 | 1 | UGCAGGUaaaagcauauggaucaa | tttc | 517 |
| Human-Exon 44 | 7 | −1 | CAGGCGAUUUGACAGAUCUGUUGA | TTTC | 518 |
| Human-Exon 44 | 8 | 1 | AGAUCUGUCAAAUCGCCUGCAGGU | tttt | 519 |
| Human-Exon 44 | 9 | 1 | CAGAUCUGUCAAAUCGCCUGCAGG | tttA | 520 |
| Human-Exon 44 | 10 | 1 | GCCGCCAUUUCUCAACAGAUCUGU | TTTG | 521 |
| Human-Exon 44 | 11 | −1 | AAUGGCGGCGUUUUCAUUAUGAUA | TTTA | 522 |
| Human-Exon 44 | 12 | 1 | AUUAAAUAUCUUUAUAUCAUAAUG | TTTT | 523 |
| Human-Exon 44 | 13 | −1 | UGAGAAUUGGGAACAUGCUAAAUA | TTTG | 524 |
| Human-Exon 44 | 14 | −1 | GGUAAGUCUUUGAUUUGUUUUUUC | TTTC | 525 |
| Human-Exon 44 | 15 | 1 | AAAUACAAUUUCGAAAAAACAAAU | TTTG | 526 |
| Human-Exon 44 | 16 | 1 | AAGAUAAAUACAAUUUCGAAAAAA | TTTG | 527 |
| Human-Exon 44 | 17 | 1 | GCUGAAGAUAAAUACAAUUUCGAA | TTTT | 528 |
| Human-Exon 44 | 18 | 1 | UGCUGAAGAUAAAUACAAUUUCGA | TTTT | 529 |
| Human-Exon 44 | 19 | 1 | GUGCUGAAGAUAAAUACAAUUUCG | TTTT | 530 |
| Human-Exon 44 | 20 | 1 | UGUGCUGAAGAUAAAUACAAUUUC | TTTC | 531 |
| Human-Exon 44 | 21 | −1 | GCACAUCUGGACUCUUUAACUUCU | TTTA | 532 |
| Human-Exon 44 | 22 | 1 | UAAAGAGUCCAGAUGUGCUGAAGA | TTTA | 533 |
| Human-Exon 44 | 23 | −1 | AAGAUCAGGUUCUGAAGGGUGAUG | TTTC | 534 |
| Human-Exon 44 | 24 | 1 | UUCAGAACCUGAUCUUUAAGAAGU | TTTA | 535 |
| Human-Exon 44 | 25 | 1 | AAUAUAAUGAUGACAACAACAGUC | TTTT | 536 |
| Human-Exon 44 | 26 | 1 | UAAUAUAAUGAUGACAACAACAGU | TTTG | 537 |
| Human-Exon 53 | 1 | −1 | UUUAUUUUUCCUUUUAUUCUAGUU | TTTC | 538 |
| Human-Exon 53 | 2 | 1 | AAAGGAAAAAUAAAUAUAUAGUAG | TTTA | 539 |
| Human-Exon 53 | 3 | 1 | UUUCAACUAGAAUAAAAGGAAAAA | TTTA | 540 |
| Human-Exon 53 | 4 | 1 | AUUCUUUCAACUAGAAUAAAAGGA | TTTT | 541 |
| Human-Exon 53 | 5 | 1 | AAUUCUUUCAACUAGAAUAAAAGG | TTTT | 542 |
| Human-Exon 53 | 6 | 1 | GAAUUCUUUCAACUAGAAUAAAAG | TTTC | 543 |
| Human-Exon 53 | 7 | 1 | AUUCUGAAUUCUUUCAACUAGAAU | TTTT | 544 |
| Human-Exon 53 | 8 | 1 | GAUUCUGAAUUCUUUCAACUAGAA | TTTA | 545 |
| Human-Exon 53 | 9 | −1 | CAGAACCGGAGGCAACAGUUGAAU | TTTC | 546 |
| Human-Exon 53 | 10 | −1 | GGAGGCAACAGUUGAAUGAAAUGU | TTTA | 547 |
| Human-Exon 53 | 11 | −1 | UAUACAGUAGAUGCAAUCCAAAAG | TTTT | 548 |
| Human-Exon 53 | 12 | −1 | GAUGCAAUCCAAAAGAAAAUCACA | TTTC | 549 |
| Human-Exon 53 | 13 | −1 | AAUCACAGAAACCAAGGUUAGUAU | TTTG | 550 |
| Human-Exon 53 | 14 | −1 | AGGUUAGUAUCAAAGAUACCUUU | TTTA | 551 |
| Human-Exon 53 | 15 | −1 | GGUUAGUAUCAAAGAUACCUUUUU | TTTT | 552 |
| Human-Exon 53 | 16 | −1 | AGUAUCAAAGAUACCUUUUUAAAA | TTTA | 553 |
| Human-Exon 53 | 17 | −1 | GUAUCAAAGAUACCUUUUUAAAAU | TTTT | 554 |
| Human-Exon 46 | 1 | −1 | UGUUUGUGUCCCAGUUUGCAUUAA | TTTG | 555 |
| Human-Exon 46 | 2 | 1 | CUGGGACACAAACAUGGCAAUUUA | TTTT | 556 |
| Human-Exon 46 | 3 | 1 | ACUGGGACACAAACAUGGCAAUUU | TTTT | 557 |
| Human-Exon 46 | 4 | 1 | AACUGGGACACAAACAUGGCAAUU | TTTA | 558 |
| Human-Exon 46 | 5 | 1 | UAUUUGUUAAUGCAAACUGGGACA | TTTG | 559 |
| Human-Exon 46 | 6 | −1 | ACAAAUAGUUUGAGAACUAUGUUG | tttC | 560 |
| Human-Exon 46 | 7 | −1 | CAAAUAGUUUGAGAACUAUGUUGG | tttt | 561 |
| Human-Exon 46 | 8 | −1 | AAAUAGUUUGAGAACUAUGUUGGa | tttt | 562 |
| Human-Exon 46 | 9 | −1 | AUAGUUUGAGAACUAUGUUGGaaa | tttt | 563 |
| Human-Exon 46 | 10 | −1 | UAGUUUGAGAACUAUGUUGGaaaa | tttt | 564 |
| Human-Exon 46 | 11 | −1 | AGUUUGAGAACUAUGUUGGaaaaa | tttt | 565 |
| Human-Exon 46 | 12 | 1 | UAGUUCUCAAACUAUUUGUUAAUG | TTTG | 566 |
| Human-Exon 46 | 13 | 1 | UAuuuuuuuuuCCAACAUAGUUCU | TTTG | 567 |
| Human-Exon 46 | 14 | −1 | CUUCUUUCUCCAGGCUAGAAGAAC | TTTT | 568 |
| Human-Exon 46 | 15 | 1 | CUUCUAGCCUGGAGAAAGAAGAAU | TTTT | 569 |
| Human-Exon 46 | 16 | 1 | UCUUCUAGCCUGGAGAAAGAAGAA | TTTA | 570 |
| Human-Exon 46 | 17 | 1 | AUUCUUUUGUUCUUCUAGCCUGGA | TTTC | 571 |
| Human-Exon 46 | 18 | −1 | CAAAAGAAUAUCUUGUCAGAAUUU | TTTG | 572 |
| Human-Exon 46 | 19 | −1 | CUGGAAAAGAGCAGCAACUAAAAG | TTTT | 573 |
| Human-Exon 46 | 20 | −1 | CAAGUCAAGGUAAUUUUAUUUUCU | TTTG | 574 |
| Human-Exon 46 | 21 | −1 | CAAAUCCCCCAGGGCCUGCUUGCA | TTTA | 575 |
| Human-Exon 46 | 22 | 1 | AGGCCCUGGGGGAUUUGAGAAAAU | TTTT | 576 |
| Human-Exon 46 | 23 | 1 | CAGGCCCUGGGGGAUUUGAGAAAA | TTTA | 577 |
| Human-Exon 46 | 24 | 1 | CAAGCAGGCCCUGGGGGAUUUGAG | TTTT | 578 |
| Human-Exon 46 | 25 | 1 | GCAAGCAGGCCCUGGGGGAUUUGA | TTTC | 579 |
| Human-Exon 46 | 26 | 1 | GCAGAAAACCAAUGAUUGAAUUAA | TTTT | 580 |
| Human-Exon 46 | 27 | 1 | GGCAGAAAACCAAUGAUUGAAUUA | TTTT | 581 |
| Human-Exon 46 | 28 | 1 | GGGCAGAAAACCAAUGAUUGAAUU | TTTT | 582 |
| Human-Exon 46 | 29 | 1 | UGGGCAGAAAACCAAUGAUUGAAU | TTTA | 583 |
| Human-Exon 46 | 30 | −1 | AUUAGGUUAUUCAUAGUUCCUUGC | TTTA | 584 |
| Human-Exon 46 | 31 | 1 | AACUAUGAAUAACCUAAUGGGCAG | TTTT | 585 |
| Human-Exon 46 | 32 | 1 | GAACUAUGAAUAACCUAAUGGGCA | TTTC | 586 |
| Human-Exon 52 | 1 | −1 | UAUUUCCUGUUAAAUUGUUUUCUA | TTTA | 587 |
| Human-Exon 52 | 2 | 1 | GGUUUAUAGAAAACAAUUUAACAG | TTTC | 588 |
| Human-Exon 52 | 3 | −1 | AUACAGUAACAUCUUUUUUAUUUC | TTTA | 589 |
| Human-Exon 52 | 4 | −1 | UACAGUAACAUCUUUUUUAUUUCU | TTTT | 590 |
| Human-Exon 52 | 5 | 1 | AUGUUACUGUAUAAGGGUUUAUAG | TTTT | 591 |
| Human-Exon 52 | 6 | 1 | GAUGUUACUGUAUAAGGGUUUAUA | TTTC | 592 |
| Human-Exon 52 | 7 | 1 | CAGCCAAAACACUUUUAGAAAUAA | TTTT | 593 |
| Human-Exon 52 | 8 | 1 | CCAGCCAAAACACUUUUAGAAAUA | TTTT | 594 |
| Human-Exon 52 | 9 | 1 | ACCAGCCAAAACACUUUUAGAAAU | TTTT | 595 |
| Human-Exon 52 | 10 | 1 | GACCAGCCAAAACACUUUUAGAAA | TTTA | 596 |
| Human-Exon 52 | 11 | 1 | GUGAGACCAGCCAAAACACUUUUA | TTTC | 597 |
| Human-Exon 52 | 12 | −1 | AAUUGUACUUUACUUUGUAUUAUG | TTTA | 598 |
| Human-Exon 52 | 13 | −1 | AUUGUACUUUACUUUGUAUUAUGU | TTTT | 599 |
| Human-Exon 52 | 14 | 1 | UAAAGUACAAUUGUGAGACCAGCC | TTTT | 600 |
| Human-Exon 52 | 15 | 1 | GUAAAGUACAAUUGUGAGACCAGC | TTTG | 601 |
| Human-Exon 52 | 16 | 1 | GUAUUCCUUUUACAUAAUACAAAG | TTTA | 602 |
| Human-Exon 52 | 17 | 1 | GUUGUGUAUUCCUUUUACAUAAUA | TTTG | 603 |
| Human-Exon 52 | 18 | 1 | AUCCUGCAUUGUUGCCUGUAAGAA | TTTG | 604 |
| Human-Exon 52 | 19 | 1 | UUCCAACUGGGGACGCCUCUGUUC | TTTG | 605 |
| Human-Exon 52 | 20 | −1 | UUGGAAGAACUCAUUACCGCUGCC | TTTG | 606 |
| Human-Exon 52 | 21 | −1 | UCAUUACCGCUGCCCAAAAUUUGA | TTTT | 607 |
| Human-Exon 52 | 22 | 1 | CUCUUGAUUGCUGGUCUUGUUUUU | TTTG | 608 |
| Human-Exon 52 | 23 | −1 | GUUUUUUAACAAGCAUGGGACACA | TTTG | 609 |
| Human-Exon 52 | 24 | 1 | CUUUGUGUGUCCCAUGCUUGUUAA | TTTT | 610 |
| Human-Exon 52 | 25 | 1 | GCUUUGUGUGUCCCAUGCUUGUUA | TTTT | 611 |
| Human-Exon 52 | 26 | 1 | UGCUUUGUGUGUCCCAUGCUUGUU | TTTT | 612 |
| Human-Exon 52 | 27 | 1 | UUGCUUUGUGUGUCCCAUGCUUGU | TTTA | 613 |
| Human-Exon 52 | 28 | −1 | AGCAAGAUGCAUGACAAGUUUCAA | TTTA | 614 |
| Human-Exon 52 | 29 | −1 | GCAAGAUGCAUGACAAGUUUCAAU | TTTT | 615 |
| Human-Exon 52 | 30 | −1 | CAAGAUGCAUGACAAGUUUCAAUA | TTTT | 616 |
| Human-Exon 52 | 31 | 1 | GAUAUAUGAACUUAAGUUUUUAUU | TTTC | 617 |
| Human-Exon 50 | 1 | −1 | AUAGAAAUCCAAUAAUAUAUUCAC | TTTG | 618 |
| Human-Exon 50 | 2 | −1 | AUUAAGAUGUUCAUGAAUUAUCUU | TTTG | 619 |
| Human-Exon 50 | 3 | −1 | UAAGUAAUGUGUAUGCUUUUCUGU | TTTA | 620 |
| Human-Exon 50 | 4 | 1 | AUCUUCUAACUUCCUCUUUAACAG | TTTT | 621 |
| Human-Exon 50 | 5 | 1 | GAUCUUCUAACUUCCUCUUUAACA | TTTC | 622 |
| Human-Exon 50 | 6 | −1 | AUCUGAGCUCUGAGUGGAAGGCGG | TTTA | 623 |
| Human-Exon 50 | 7 | −1 | ACCGUUUACUUCAAGAGCUGAGGG | TTTG | 624 |
| Human-Exon 50 | 8 | 1 | CUGCUUUGCCCUCAGCUCUUGAAG | TTTA | 625 |
| Human-Exon 50 | 9 | −1 | UCUCUUUGGCUCUAGCUAUUUGUU | TTTG | 626 |
| Human-Exon 50 | 10 | −1 | CUCUUUGGCUCUAGCUAUUUGUUC | TTTT | 627 |
| Human-Exon 50 | 11 | 1 | CACUUUUGAACAAAUAGCUAGAGC | TTTG | 628 |
| Human-Exon 50 | 12 | 1 | UCACUUCAUAGUUGCACUUUUGAA | TTTG | 629 |
| Human-Exon 50 | 13 | −1 | AUGAAGUGAUGACUGGGUGAGAGA | TTTC | 630 |
| Human-Exon 50 | 14 | −1 | UGAAGUGAUGACUGGGUGAGAGAG | TTTT | 631 |
| Human-Exon 43 | 1 | 1 | AAGAGAAAAauauauauauauaua | TTTG | 632 |
| Human-Exon 43 | 2 | 1 | GAAUUAGCUGUCUAUAGAAAGAGA | tTTT | 633 |
| Human-Exon 43 | 3 | 1 | UGAAUUAGCUGUCUAUAGAAAGAG | TTTT | 634 |
| Human-Exon 43 | 4 | −1 | AGCUAAUUCAUUUUUUUACUGUUU | TTTA | 635 |
| Human-Exon 43 | 5 | 1 | AUGAAUUAGCUGUCUAUAGAAAGA | TTTC | 636 |
| Human-Exon 43 | 6 | −1 | GCUAAUUCAUUUUUUUACUGUUUU | TTTT | 637 |
| Human-Exon 43 | 7 | 1 | AAAAAAAUGAAUUAGCUGUCUAUA | TTTC | 638 |
| Human-Exon 43 | 8 | −1 | UUAAAAUUUUUAUAUUACAGAAUA | TTTA | 639 |
| Human-Exon 43 | 9 | −1 | UAAAAUUUUUAUAUUACAGAAUAU | TTTT | 640 |
| Human-Exon 43 | 10 | 1 | AUAUAAAAAUUUUAAAACAGUAAA | TTTT | 641 |
| Human-Exon 43 | 11 | 1 | AAUAUAAAAAUUUUAAAACAGUAA | TTTT | 642 |
| Human-Exon 43 | 12 | 1 | UAAUAUAAAAAUUUUAAAACAGUA | TTTT | 643 |
| Human-Exon 43 | 13 | 1 | GUAAUAUAAAAAUUUUAAAACAGU | TTTT | 644 |
| Human-Exon 43 | 14 | 1 | UGUAAUAUAAAAAUUUUAAAACAG | TTTA | 645 |
| Human-Exon 43 | 15 | 1 | UAUAUUCUGUAAUAUAAAAAUUUU | TTTT | 646 |
| Human-Exon 43 | 16 | 1 | UUAUAUUCUGUAAUAUAAAAAUUU | TTTA | 647 |
| Human-Exon 43 | 17 | −1 | CAGAAUAUAAAAGAUAGUCUACAA | TTTG | 648 |
| Human-Exon 43 | 18 | 1 | CUAUCUUUUAUAUUCUGUAAUAUA | TTTT | 649 |
| Human-Exon 43 | 19 | 1 | ACUAUCUUUUAUAUUCUGUAAUAU | TTTT | 650 |
| Human-Exon 43 | 20 | 1 | GACUAUCUUUUAUAUUCUGUAAUA | TTTA | 651 |
| Human-Exon 43 | 21 | −1 | CAUAGCAAGAAGACAGCAGCAUUG | TTTG | 652 |
| Human-Exon 43 | 22 | 1 | CAUUUUGUUAACUUUUUCCCAUUG | TTTC | 653 |
| Human-Exon 43 | 23 | −1 | CAUAUAUUUUUCUUGAUACUUGCA | TTTC | 654 |
| Human-Exon 43 | 24 | 1 | AAAUCAUUUCUGCAAGUAUCAAGA | TTTT | 655 |
| Human-Exon 43 | 25 | 1 | CAAAUCAUUUCUGCAAGUAUCAAG | TTTT | 656 |
| Human-Exon 43 | 26 | 1 | ACAAAUCAUUUCUGCAAGUAUCAA | TTTC | 657 |
| Human-Exon 43 | 27 | 1 | AUAAAUUCUACAGUUCCCUGAAAA | TTTG | 658 |
| Human-Exon 43 | 28 | −1 | GAAUUUAUUUCAGUACCCUCCAUG | TTTC | 659 |
| Human-Exon 43 | 29 | −1 | AAUUUAUUUCAGUACCCUCCAUGG | TTTT | 660 |
| Human-Exon 43 | 30 | 1 | UGAAAUAAAUUCUACAGUUCCCUG | TTTT | 661 |
| Human-Exon 43 | 31 | −1 | AUUUAUUUCAGUACCCUCCAUGGA | TTTT | 662 |
| Human-Exon 43 | 32 | 1 | CUGAAAUAAAUUCUACAGUUCCCU | TTTC | 663 |
| Human-Exon 43 | 33 | −1 | UUUAUUUCAGUACCCUCCAUGGAA | TTTT | 664 |
| Human-Exon 43 | 34 | −1 | UACCCUCCAUGGAAAAAAGACAGG | TTTC | 665 |
| Human-Exon 43 | 35 | −1 | ACCCUCCAUGGAAAAAAGACAGGG | TTTT | 666 |
| Human-Exon 43 | 36 | −1 | CCCUCCAUGGAAAAAAGACAGGGA | TTTT | 667 |
| Human-Exon 43 | 37 | 1 | UUUUUUCCAUGGAGGGUACUGAAA | TTTA | 668 |
| Human-Exon 43 | 38 | 1 | UGUCUUUUUUCCAUGGAGGGUACU | TTTC | 669 |
| Human-Exon 6 | 1 | 1 | CCUUGAGCAAGAACCAUGCAAACU | TTTA | 670 |
| Human-Exon 6 | 2 | −1 | UGCUCAAGGAAUGCAUUUUCUUAU | TTTC | 671 |
| Human-Exon 6 | 3 | −1 | GCUCAAGGAAUGCAUUUUCUUAUG | TTTT | 672 |
| Human-Exon 6 | 4 | 1 | UGCAUUCCUUGAGCAAGAACCAUG | TTTG | 673 |
| Human-Exon 6 | 5 | −1 | GAAAAUUUAUUUCCACAUGUAGGU | TTTG | 674 |
| Human-Exon 6 | 6 | −1 | AAAAUUUAUUUCCACAUGUAGGUC | TTTT | 675 |
| Human-Exon 6 | 7 | −1 | AAAUUUAUUUCCACAUGUAGGUCA | TTTT | 676 |
| Human-Exon 6 | 8 | 1 | CAUGUGGAAAUAAAUUUUCAUAAG | TTTT | 677 |
| Human-Exon 6 | 9 | 1 | ACAUGUGGAAAUAAAUUUUCAUAA | TTTC | 678 |
| Human-Exon 6 | 10 | −1 | CCACAUGUAGGUCAAAAAUGUAAU | TTTC | 679 |
| Human-Exon 6 | 11 | −1 | CACAUGUAGGUCAAAAAUGUAAUG | TTTT | 680 |
| Human-Exon 6 | 12 | −1 | ACAUGUAGGUCAAAAAUGUAAUGA | TTTT | 681 |
| Human-Exon 6 | 13 | 1 | ACAUUUUUGACCUACAUGUGGAAA | TTTA | 682 |
| Human-Exon 6 | 14 | 1 | CAUUACAUUUUUGACCUACAUGUG | TTTC | 683 |
| Human-Exon 6 | 15 | −1 | AAAAAUAUCAUGGCUGGAUUGCAA | TTTG | 684 |
| Human-Exon 6 | 16 | −1 | GCUGGAUUGCAACAAACCAACAGU | TTTC | 685 |
| Human-Exon 6 | 17 | −1 | CUGGAUUGCAACAAACCAACAGUG | TTTT | 686 |
| Human-Exon 6 | 18 | 1 | CCUAUGACUAUGGAUGAGAGCAUU | TTTG | 687 |
| Human-Exon 6 | 19 | −1 | UAGGUAAGAAGAUUACUGAGACAU | TTTA | 688 |
| Human-Exon 6 | 20 | −1 | AUUACUGAGACAUUAAAUAACUUG | TTTA | 689 |
| Human-Exon 6 | 21 | −1 | UUACUGAGACAUUAAAUAACUUGU | TTTT | 690 |
| Human-Exon 6 | 22 | 1 | GGGGAAAAAUAUGUCAUCAGAGUC | TTTA | 691 |
| Human-Exon 6 | 23 | 1 | CAUGAUCUGGAACCAUACUGGGGA | TTTT | 692 |
| Human-Exon 6 | 24 | 1 | ACAUGAUCUGGAACCAUACUGGGG | TTTT | 693 |
| Human-Exon 6 | 25 | 1 | GACAUGAUCUGGAACCAUACUGGG | TTTC | 694 |
| Human-Exon 7 | 1 | 1 | uacacacauacacaAAGACAAAUA | TTTA | 695 |
| Human-Exon 7 | 2 | 1 | uacacauacacacauacacaAAGA | TTTG | 696 |
| Human-Exon 7 | 3 | 1 | aacacauacacauacacacauaca | TTtg | 697 |
| Human-Exon 7 | 4 | 1 | AUUCCAGUCAAAUAGGUCUGGCCU | ttTT | 698 |
| Human-Exon 7 | 5 | 1 | UAUUCCAGUCAAAUAGGUCUGGCC | tTTA | 699 |
| Human-Exon 7 | 6 | 1 | GCUGGCAAACCACACUAUUCCAGU | TTTG | 700 |
| Human-Exon 7 | 7 | 1 | AGUCGUUGUGUGGCUGACUGCUGG | TTTG | 701 |
| Human-Exon 7 | 8 | −1 | CGCCAGAUAUCAAUUAGGCAUAGA | TTTC | 702 |
| Human-Exon 7 | 9 | −1 | AAACUACUCGAUCCUGAAGGUUGG | TTTA | 703 |
| Human-Exon 7 | 10 | 1 | CAUACUAAAAGCAGUGGUAGUCCA | TTTC | 704 |
| Human-Exon 7 | 11 | 1 | GAAAACAUUAAACUCUACCAUACU | TTTT | 705 |
| Human-Exon 7 | 12 | 1 | UGAAAACAUUAAACUCUACCAUAC | TTTA | 706 |
| Human-Exon 8 | 1 | −1 | UUGUUCAUUAUCCUUUUAGAGUCU | TTTG | 707 |
| Human-Exon 8 | 2 | 1 | AAAGGAUAAUGAACAAAUCAAAGU | TTTA | 708 |
| Human-Exon 8 | 3 | −1 | UAUCCUUUUAGAGUCUCAAAUAUA | TTTC | 709 |
| Human-Exon 8 | 4 | 1 | ACUCUAAAAGGAUAAUGAACAAAU | TTTG | 710 |
| Human-Exon 8 | 5 | −1 | UUUUAGAGUCUCAAAUAUAGAAAC | TTTG | 711 |
| Human-Exon 8 | 6 | −1 | UUUAGAGUCUCAAAUAUAGAAACC | TTTT | 712 |
| Human-Exon 8 | 7 | −1 | UUAGAGUCUCAAAUAUAGAAACCA | TTTT | 713 |
| Human-Exon 8 | 8 | 1 | UUGAGACUCUAAAAGGAUAAUGAA | TTTG | 714 |
| Human-Exon 8 | 9 | 1 | UUUGGUUUCUAUAUUUGAGACUCU | TTTT | 715 |
| Human-Exon 8 | 10 | 1 | UUUUGGUUUCUAUAUUUGAGACUC | TTTA | 716 |
| Human-Exon 8 | 11 | −1 | AGCAUUGAAGCCAUCCAGGAAGUG | TTTC | 717 |
| Human-Exon 8 | 12 | 1 | GCUUCAAUGCUCACUUGUUGAGGC | TTTT | 718 |
| Human-Exon 8 | 13 | 1 | GGCUUCAAUGCUCACUUGUUGAGG | TTTG | 719 |
| Human-Exon 8 | 14 | −1 | AGUGGAAAUGUUGCCAAGGCCACC | TTTA | 720 |
| Human-Exon 8 | 15 | −1 | GUUGCCAAGGCCACCUAAAGUGAC | TTTA | 721 |
| Human-Exon 8 | 16 | −1 | GAAGAACAUUUUCAGUUACAUCAU | TTTG | 722 |
| Human-Exon 8 | 17 | −1 | AUCAAAUGCACUAUUCUCAACAGG | TTTA | 723 |
| Human-Exon 8 | 18 | 1 | AUAGUGCAUUUGAUGAUGUAACUG | TTTT | 724 |
| Human-Exon 8 | 19 | 1 | AAUAGUGCAUUUGAUGAUGUAACU | TTTC | 725 |
| Human-Exon 8 | 20 | −1 | ACUAUUCUCAACAGGUAAAGUGUG | TTTA | 726 |
| Human-Exon 8 | 21 | 1 | UACCUAAAAAUGCAUAUAAAACAG | TTTT | 727 |
| Human-Exon 8 | 22 | 1 | AUACCUAAAAAUGCAUAUAAAACA | TTTC | 728 |
| Human-Exon 8 | 23 | 1 | CACGUAAUACCUAAAAAUGCAUAU | TTTT | 729 |
| Human-Exon 8 | 24 | 1 | GCACGUAAUACCUAAAAAUGCAUA | TTTA | 730 |
| Human-Exon 8 | 25 | 1 | auauauauGUGCACGUAAUACCUA | TTTT | 731 |
| Human-Exon 8 | 26 | 1 | uauauauauGUGCACGUAAUACCU | TTTT | 732 |
| Human-Exon 8 | 27 | 1 | auauauauauGUGCACGUAAUACC | TTTA | 733 |
| Human-Exon 55 | 1 | −1 | CUGCACAAUAUUAUAGUUGUUGCU | TTTA | 734 |
| Human-Exon 55 | 2 | 1 | AUAAAAAGAGAAAGAUGGAGGAAC | TTTA | 735 |
| Human-Exon 55 | 3 | 1 | CACCUAGUGAACUCCAUAAAAAGA | TTTC | 736 |
| Human-Exon 55 | 4 | 1 | AUGGUGCACCUAGUGAACUCCAUA | TTTT | 737 |
| Human-Exon 55 | 5 | 1 | AAUGGUGCACCUAGUGAACUCCAU | TTTT | 738 |
| Human-Exon 55 | 6 | 1 | GAAUGGUGCACCUAGUGAACUCCA | TTTA | 739 |
| Human-Exon 55 | 7 | 1 | GACCAAAUGUUCAGAUGCAAUUAU | TTTA | 740 |
| Human-Exon 55 | 8 | 1 | UCGCUCACUCACCCUGCAAAGGAC | TTTG | 741 |
| Human-Exon 55 | 9 | −1 | AGUGAGCGAGAGGCUGCUUUGGAA | TTTC | 742 |
| Human-Exon 55 | 10 | 1 | GCAGCCUCUCGCUCACUCACCCUG | TTTG | 743 |
| Human-Exon 55 | 11 | 1 | UUGCAGUAAUCUAUGAGUUUCUUC | TTTG | 744 |
| Human-Exon 55 | 12 | −1 | CUGCAACAGUUCCCCCUGGACCUG | TTTC | 745 |
| Human-Exon 55 | 13 | −1 | UGCAACAGUUCCCCCUGGACCUGG | TTTT | 746 |
| Human-Exon 55 | 14 | −1 | UUUCUUGCCUGGCUUACAGAAGCU | TTTC | 747 |
| Human-Exon 55 | 15 | 1 | UUUCAGCUUCUGUAAGCCAGGCAA | TTTC | 748 |
| Human-Exon 55 | 16 | −1 | GUCCUACAGGAUGCUACCCGUAAG | TTTC | 749 |
| Human-Exon 55 | 17 | −1 | GGCUCCUAGAAGACUCCAAGGGAG | TTTA | 750 |
| Human-Exon 55 | 18 | −1 | GCUCCUAGAAGACUCCAAGGGAGU | TTTT | 751 |
| Human-Exon 55 | 19 | −1 | CUCCAAGGGAGUAAAAGAGCUGAU | TTTC | 752 |
| Human-Exon 55 | 20 | 1 | UGGAUCCACAAGAGUGCUAAAGCG | TTTC | 753 |
| Human-Exon 55 | 21 | 1 | GUUCAAUUGGAUCCACAAGAGUGC | TTTA | 754 |
| Human-Exon 55 | 22 | −1 | UACUUGUAACUGACAAGCCAGGGA | TTTG | 755 |
| Human-Exon 55 | 23 | −1 | ACUUGUAACUGACAAGCCAGGGAC | TTTT | 756 |
| Human-Exon 55 | 24 | −1 | GUAACUGACAAGCCAGGGACAAAA | TTTG | 757 |
| Human-Exon 55 | 25 | −1 | UAACUGACAAGCCAGGGACAAAAC | TTTT | 758 |
| Human-Exon 55 | 26 | 1 | UCCCUGGCUUGUCAGUUACAAGUA | TTTG | 759 |
| Human-G1-exon51 | | 1 | CAGAGUAACAGUCUGAGUAGGAGc | TTTA | 760 |
| Human-G2-exon51 | | 1 | uacuuuguuuagcaauacauggua | TTTC | 761 |
| Human-G3-exon51 | | −1 | uggcucaaauuguuacucuucaau | TTTA | 762 |
| mouse-Exon23-G1 | | 1 | CUUUCAAagaacuuugcagagccu | TTTG | 763 |
| mouse-Exon23-G2 | | 1 | guugaaGCCAUUUUGUUGCUCUUU | TTTG | 764 |
| mouse-Exon23-G3 | | 1 | guugaaGCCAUUUUAUUGCUCUUU | TTTG | 765 |
| mouse-Exon23-G4 | | −1 | uuuugagGCUCUGCAAAGUUCUUU | TTTC | 766 |
| mouse-Exon23-G5 | | −1 | aguuauuaaugcauagauauucag | TTTA | 767 |
| mouse-Exon23-G6 | | −1 | uauaauaugcccuguaauauaaua | TTTC | 768 |
| mouse-Exon23-G7 | | 1 | uaaaggccaaaccucggcuuaccU | TTTC | 769 |
| mouse-Exon23-G8 | | 1 | ucaauaucuuugaaggacucuggg | TTTA | 770 |

*In this table, upper case letters represent sgRNA nucleotides that align to the exon sequence of the gene. Lower case letters represent sgRNA nucleotides that align to the intron sequence of the gene.

### VI. EXAMPLES

[0215] The following examples are included to demonstrate preferred embodiments of the disclosure. It should be appreciated by those of skill in the art that the techniques disclosed in the examples which follow represent techniques discovered by the inventor to function well in the practice of the disclosure, and thus can be considered to constitute preferred modes for its practice. However, those of skill in the art should, in light of the present disclosure, appreciate that many changes can be made in the specific embodiments which are disclosed and still obtain a like or similar result without departing from the spirit and scope of the disclosure.

### Example 1—Materials and Methods

[0216] Generation of pLbCpf1-2A-GFP and pAsCpf1-2A-GFP Plasmids.

[0217] Human codon-optimized LbCpf1 and AsCpf1 were PCR amplified from pY016 plasmid (Zetsche et al., 2015) (pcDNA3.1-hLbCpf1), a gift from Feng Zhang (Addgene plasmid #69988) and pY010 plasmid (Zetsche et al., 2015) (pcDNA3.1-hAsCpf1), a gift from Feng Zhang (Addgene plasmid #69982), respectively. Cpf1 cDNA and T2A-GFP DNA fragment were cloned into the backbone of the pSpCas9(BB)-2A-GFP (PX458) plasmid (Ran et al., 2015), a gift from Feng Zhang (Addgene plasmid #48138) that was cut with AgeI/EcoRI to remove SpCas9(BB)-2A-GFP. In-Fusion HD cloning kit (Takara Bio) was used. Cpf1 guide RNAs (gRNAs) targeting the human DMD or the mouse Dmd locus were sub-cloned into a newly generated pLbCpf1-2A-GFP plasmid and pAsCpf1-2A-GFP plasmid using BbsI digestion and T4 ligation. Detailed primer sequences can be found in Table C, genomic target sequences can be found in Table D, and gRNA sequences can be found in Table E.

[0218] Human iPSC Maintenance, Nucleofection and Differentiation.

[0219] Human iPSCs were cultured in mTeSRTMI media (STEMCELL Technologies) and passaged approximately every 4 days (1:18 split ratio). One hour before nucleofection, iPSCs were treated with 10 μM ROCK inhibitor (Y-27632) and dissociated into single cells using Accutase (Innovative Cell Technologies, Inc.). 1×10⁶ iPSC cells were mixed with 5 pg of pLbCpf1-2A-GFP or pAsCpf1-2A-GFP plasmid and nucleofected using the P3 Primary Cell 4D-Nucleofector X kit (Lonza) according to manufacturer's protocol. After nucleofection, iPSCs were cultured in mTeSR™1 media supplemented with 10 μM ROCK inhibitor, penicillin-streptomycin (1:100) (ThermoFisher Scientific) and 100 pg/ml Primosin (InvivoGen). Three days post-nucleofection, GFP(+) and (−) cells were sorted by FACS and subjected to T7E1 assay. Single clones derived from GFP(+). iPSCs were picked and sequenced. iPSCs were induced to differentiate into cardiomyocytes, as previously described (Burridge et al. 2014).

[0220] Genomic DNA Isolation.

[0221] Genomic DNA of mouse 10T1/2 fibroblasts and human iPSCs was isolated using Quick-gDNA MiniPrep kit (Zymo Research) according to manufacturer's protocol.

[0222] RT-PCR.

[0223] RNA was isolated using TRIzol (ThermoFisher Scientific), according to manufacturer's protocol. cDNA was synthesized using iScript Reverse Transcription Supermix (Bio-Rad Laboratories) according to manufacturer's protocol. RT-PCR was performed using primers flanking DMD exon 47 and 52:

(SEQ ID NO: 1)
forward: 5′-CCCAGAAGAGCAAGATAAACTTGAA-3′;
(SEQ ID NO: 2)
reverse: 5′-CTCTGTTCCAAATCCTGCTTGT-3′

RT-PCR products amplified from WT cardiomyocytes, uncorrected cardiomyocytes and exon 51 skipped cardiomyocytes were 717 bps, 320 bps and 87 bps, respectively.

[0224] Dystrophin Western Blot Analysis.

[0225] Western blot analysis were performed as previously described (Long et al., 2014) using rabbit anti-dystrophin antibody (Abcam, ab15277) and mouse anti-cardiac myosin heavy chain antibody (Abcam, ab50967).

[0226] Dystrophin Immunocytochemistry and Immunohistochemistry.

[0227] iPSC-derived cardiomyocytes fixed with acetone, blocked with serum cocktail (2% normal horse serum/2% normal donkey serum/0.2% bovine serum albumin (BSA)/PBS), and incubated with dystrophin antibody (MANDYS8, 1:800, Sigma-Aldrich) and troponin-I antibody (H170, 1:200, Santa Cruz Biotechnology) in 0.2% BSA/PBS. Following overnight incubation at 4° C., they were incubated with secondary antibodies (biotinylated horse anti-mouse IgG, 1:200, Vector Laboratories, fluorescein-conjugated donkey anti-rabbit IgG, 1:50, Jackson Immunoresearch) for one-hour. Nuclei were counterstained with Hoechst 33342 (Molecular Probes).

[0228] Immunohistochemisty of skeletal muscle was performed as previously described (Long et al., 2014) using dystrophin antibody (MANDYS8, 1:800, Sigma-Aldrich). Nuclei were counterstained with propidium iodide (Molecular Probes).

[0229] Mitochondrial DNA Copy Number Quantification.

[0230] Genomic and mitochondrial DNA were isolated using Trizol, followed by back extraction as previously described (Zechner et al., 2010). KAPA SYBR FAST qPCR kit (Kapa Biosystems) was used to perform real-time PCR to quantitatively determine mitochondrial DNA copy number. Human mitochondrial ND1 gene was amplified using primers (forward: 5′-CGCCACATCTACCATCACCCTC-3′ (SEQ ID NO: 3); reverse: 5′-CGGCTAGGCTAGAGGTGGCTA-3′(SEQ ID NO: 4)). Human genomic LPL gene was amplified using primers (forward: 5′-GAGTATGCAGAAGCCCCGAGTC-3′ (SEQ ID NO: 5); reverse: 5′-TCAACATGCCCAACTGGTTTCTGG-3′ (SEQ ID NO: 6)). mtDNA copy number per diploid genome was calculated using formula:

ΔCT=(mtND1CT−LPL CT)

mtDNA copy number per diploid genome=2×2−ΔCT

[0231] Cellular Respiration Rates.

[0232] Oxygen consumption rates (OCR) were determined in human iPSC-derived cardiomyocytes using the XF24 Extracellular Flux Analyzer (Seahorse Bioscience) following the manufacturer's protocol as previously described (Baskin et al., 2014).

[0233] In Vitro Transcription of LbCpf1 mRNA and gRNA.

[0234] Human codon-optimized LbCpf1 was PCR amplified from pLbCpf1-2A-GFP to include the T7 promoter sequence (Table S1). The PCR product was transcribed using mMESSAGE mMACHINE T7 transcription kit (ThermoFisher Scientific) according to manufacturer's protocol. Synthesized LbCpf1 mRNA were poly-A tailed with E. coli Poly(A) Polymerase (New England Biolabs) and purified using NucAway spin columns (ThermoFisher Scientific).

[0235] The template for LbCpf1 gRNA in vitro transcription was PCR amplified from pLbCpf1-2A-GFP plasmid and purified using Wizard SV gel and PCR clean-up system (Promega). The LbCpf1 gRNA was synthesized using MEGAshortscript T7 transcription kit (ThermoFisher Scientific) according to manufacturer's protocol. Synthesized LbCpf1 gRNA were purified using NucAway spin columns (ThermoFisher Scientific).

[0236] Single-Stranded Oligodeoxynucleotide (ssODN).

[0237] ssODN was used as HDR template and synthesized by Integrated DNA Technologies as 4 nM Ultramer Oligonucleotides. ssODN was mixed with LbCpf1 mRNA and gRNA directly without purification. The sequence of ssODN is:

(SEQ ID NO: 7)
5′-TGATATGAATGAAACTCATCAAATATGCGTGTTAGTGTAAATGAACT
TCTATTTAATTTTGAGGCTCTGCAAAGTTCTTTAAAGGAGCAGCAGAATG
GCTTCAACTATCTGAGTGACACTGTGAAGGAGATGGCCAAGAAAGCACCT
TCAGAAATATGCCAGAAATATCTGTCAGAATTT-3′

[0238] CRISPR-Cpf1-Mediated Genome Editing by One-Cell Embryo Injection.

[0239] All animal procedures were approved by the Institutional Animal Care and Use Committee at the University of Texas Southwestern Medical Center. Injection procedures were performed as described previously (Long et al., 2014). The only modification was replacing Cas9 mRNA and Cas9 sgRNAs with LbCpf1 mRNA and LbCpf1 gRNAs.

[0240] PCR Amplification of Genomic DNA, T7E1 Assay, and TseI RFLP Analysis.

[0241] These methods were preformed as previously published (Long et al., 2014).

[0242] Statistical Analysis.

[0243] Statistical analysis was assessed by two-tailed Student's t-test. Data are shown as mean±SEM. A P<0.05 value was considered statistically significant.

### Example 2—Results

[0244] Correction of DMD iPSC-Derived Cardiomyocytes by Cpf1-Mediated Genome Editing.

[0245] Exon deletions preceding exon 51 of the human DMD gene, which disrupt the open reading frame (ORF) by juxtaposing out of frame exons, represent the most common type of human DMD mutation (Aartsma-Rus et al., 2009). Skipping of exon 51 can, in principle, restore the DMD ORF in 13% of DMD patients with exon deletions (Cirak et al., 2011). To test the potential of Cpf1 to correct this type of “hot-spot” mutation, the inventors used DMD fibroblast-derived iPSCs (Riken HPS0164, abbreviated as Riken51), which harbor a deletion of exons 48 to 50, introducing a premature termination codon within exon 51 (FIG. 1A).

[0246] The splice acceptor region is generally T/C-rich (Padgett, 2012), which creates an ideal PAM sequence for genome editing by Cpf1 endonuclease (FIG. 1B). To rescue dystrophin expression in Riken51 iPSCs, the inventors used a Cpf1 gRNA to target exon 51, introducing small insertions and deletions (INDELs) in exon 51 by NHEJ and subsequently reframing the dystrophin ORF, theoretically, in one-third of corrected genes, a process inventors refer to as “reframing” (FIG. 1A). They also compared two Cpf1 orthologs, LbCpf1 (from Lachnospiraceae bacterium sp. ND2006; UniProt Accession No. AOA182DWE3; SEQ ID No. 443) and AsCpf1 (from Acidaminococcus sp. BV3L6; SEQ ID No. 442), which use the same PAM sequences for genome cleavage.

[0247] Cpf1 cleavage was targeted to the T-rich splice acceptor site of exon 51 using a guide RNA (designated g1) (FIG. 1C), which was cloned into plasmids pLbCpf1-2A-GFP and pAsCpf1-2A-GFP (FIG. 1D). These plasmids express human codon optimized LbCpf1 or AsCpf1, plus GFP; enabling fluorescence activated cell sorting (FACS) of Cpf1-expressing cells (FIG. 1D). Initially, inventors evaluated the cleavage efficiency of Cpf1-editing with g1 in human 293T cells. Both LbCpf1 and AsCpf1 efficiently induced DNA cleavage with g1, as detected using a T7E1 assay that recognizes and cleaves non-perfectly matched DNA (FIG. 1E).

[0248] Next, inventors used LbCpf1 and AsCpf1 with g1 to edit Riken51 iPSCs, and by the T7E1 assay the inventors observed genome cleavage at DMD exon 51 (FIG. 1E). Genomic PCR products from the Cpf1-edited DMD exon 51 were cloned and sequenced (FIG. 6A). They observed INDELs near the exon 51 splice acceptor site in both LbCpf1- and AsCpf1-edited Riken51 iPSCs (FIG. 6A). Single clones from a mixture of reframed Riken51 iPSCs were picked and expanded and the edited genomic region was sequenced. Out of 12 clones, inventors observed four clones with reframed DMD exon 51, which restored the ORF (FIG. 6B).

[0249] Restoration of Dystrophin Expression in DMD iPSC-Derived Cardiomyocytes after Cpf1-Mediated Reframing.

[0250] Riken51 iPSCs edited by CRISPR-Cpf1 using the reframing strategy were induced to differentiate into cardiomyocytes (Burridge et al., 2014) (FIG. 2A). Cardiomyocytes with the reframed DMD gene were identified by RT-PCR using a forward primer targeting exon 47 and a reverse primer targeting exon 52 and PCR products were sequenced (FIGS. 2B-C). Uncorrected iPSC-derived cardiomyocytes have a premature termination codon following the first 8 amino acids encoded by exon 51, which creates a premature stop codon (FIG. 2C). Cardiomyocytes differentiated from Cpf1-edited Riken51 iPSCs showed restoration of the DMD ORF as seen by sequencing of the RT-PCR products from amplification of exons 47 to 52 (FIG. 2C). The inventors also confirmed restoration of dystrophin protein expression by Western blot analysis and immunocytochemistry using dystrophin antibody (FIGS. 2D-E). Surprisingly, even without clonal selection and expansion, cardiomyocytes differentiated from Cpf1-edited iPSC mixtures showed levels of dystrophin protein comparable to WT cardiomyocytes (FIG. 2D).

[0251] From mixtures of LbCpf1-edited Riken51 iPSCs, the inventors picked two clones (clone #2 and #5) with in-frame INDELs of different sizes and differentiated the clones into cardiomyocytes. Clone #2 had an 8 bp deletion at the 5′-end of exon 51, together with an endogenous deletion of exons 48-50. The total 405 bp deletion restored the DMD ORF and allowed for the production of a truncated dystrophin protein with a 135 amino acid deletion. Clone #5 had a 17 bp deletion in exon 51 and produced dystrophin protein with a 138 amino acid deletion. Although there is high efficiency of cleavage by Cpf1, the amount of DNA inserted or deleted at the cleavage site varies. Additionally, INDELs can generate extra codons at the edited locus, causing changes of the ORF. The dystrophin protein expressed by clone #2 cardiomyocytes generated an additional four amino acids (Leu-Leu-Leu-Arg) between exon 47 and exon 51, whereas dystrophin protein expressed by clone #5 cardiomyocytes generated only one additional amino acid (Leu). From both clones #2 and #5, the inventors observed restored dystrophin protein by Western blot analysis and immunocytochemistry (FIGS. 2F-G). Due to the large size of dystrophin, the internally-deleted forms migrated similarly to WT dystrophin on SDS-PAGE.

[0252] The inventors also performed functional analysis of DMD iPSC-derived cardiomyocytes by measuring mitochondrial DNA copy number and cellular respiration rates. Uncorrected DMD iPSC-derived cardiomyocytes had significantly fewer mitochondria than the LbCpf1-corrected cardiomyocytes (FIG. 2H). After LbCpf1-mediated reframing, both corrected clones restored mitochondrial number to a level comparable to that of WT cardiomyocytes (FIG. 2H). Clone #2 iPSC-derived cardiomyocytes also showed an increase in oxygen consumption rate (OCR) compared to uncorrected iPSC-derived cardiomyocytes at baseline (FIG. 2I). OCR was inhibited by oligomycin in all iPSC-derived cardiomyocytes, and treatment with the uncoupling agent FCCP enhanced OCR. Finally, treatment with rotenone and antimycin A further inhibited OCR in all cardiomyocytes. These results demonstrate that Cpf1-mediated DMD correction improved respiratory capacity of mitochondria in corrected iPSC-cardiomyocytes. Our findings show that Cpf1-mediated reframing is a highly efficient strategy to rescue DMD phenotypes in human cardiomyocytes.

[0253] Restoration of Dystrophin Expression in DMD iPSC-Derived Cardiomyocytes by Cpf1-Mediated Exon Skipping.

[0254] In contrast to the single gRNA-mediated reframing method, which introduces small INDELs, exon skipping uses two gRNAs to disrupt splice sites and generates a large deletion (FIG. 3A). As an independent strategy to restore dystrophin expression in the Riken51 iPSCs, the inventors designed two LbCpf1 gRNAs (g2 and g3) that target the 3′-end of intron 50 and tested the cleavage efficiency in human 293T cells. T7E1 assay showed that g2 had higher cleavage efficiency within intron 50 compared to g3 (FIG. 3B). Therefore, the inventors co-delivered LbCpf1, g2 and g1 (g1 targets the 5′ region of exon 51) into Riken51 iPSCs with the aim of disrupting the splice acceptor site of exon 51. Genomic PCR showed a lower band in LbCpf1-edited iPSCs (FIG. 3C) and sequencing data confirmed the presence of a deletion of −200 bp between intron 50 and exon 51, which disrupted the conserved splice acceptor site (FIG. 3D).

[0255] Riken51 iPSCs edited by the exon skipping strategy with g1 and g2 were differentiated into cardiomyocytes. Cells harboring the edited DMD allele were identified by RT-PCR using a forward primer targeting exon 47 and a reverse primer targeting exon 52; showing deletion of the exon 51 splice acceptor site which allows skipping of exon 51 (FIG. 3E). Sequencing of the RT-PCR products confirmed that exon 47 was spliced to exon 52, which restored the DMD ORF (FIG. 3F). Western blot analysis and immunocytochemistry confirmed the restoration of dystrophin protein expression in a mixture of LbCpf1-edited cardiomyocytes with g1 and g2 (FIGS. 3G-H). Thus, Cpf1-editing by the exon skipping strategy is highly efficient in rescuing the DMD phenotype in human cardiomyocytes.

[0256] Restoration of Dystrophin in Mdx Mice by Cpf1-Mediated Correction.

[0257] To further evaluate the potential of Cpf1-mediated Dmd correction in vivo, the inventors used LbCpf1 to permanently correct the mutation in germline of mdx mice by HDR-mediated correction or NHEJ-mediated reframing. mdx mice carry a nonsense mutation in exon 23 of the Dmd gene, due to a C to T transition (FIG. 4A). Three gRNAs (g1, g2 and g3) that target exon 23 were screened and tested in mouse 10T1/2 fibroblasts for cleavage efficiency (FIG. 4B). The T7E1 assay revealed that LbCpf1 and AsCpf1 had different cleavage efficiencies at Dmd exon 23 (FIG. 4C). Based on sequencing results, LbCpf1-mediated genome editing using g2 generated a greater occurrence of INDELs in mouse fibroblasts compared to g3 (FIG. 6C).

[0258] LbCpf1-editing with g2 recognizes a PAM sequence 9 bps upstream of the mutation site and creates a staggered double-stranded DNA cut 8 bps downstream of the mutation site (FIG. 4D). To obtain HDR genome editing, the inventors used a 180 bp single-stranded oligodeoxynucleotide (ssODN) in combination with LbCpf1 and g2 since it has been shown that ssODNs are more efficient in introducing genomic modification than double-stranded donor plasmids (Wu et al., 2013; Long et al., 2014). They generated a ssODN containing 90 bp of homology sequence flanking the cleavage site, including, four silent mutations and a TseI restriction site to facilitate genotyping as previously described (Long et al., 2014). This ssODN was designed to be used with LbCpf1 and g2 to correct the C to T mutation within Dmd exon 23 and to restore dystrophin in mdx mice by HDR.

[0259] Correction of Muscular Dystrophy in Mdx Mice by LbCpf1-Mediated HDR.

[0260] mdx zygotes were co-injected with in vitro transcribed LbCpf1 mRNA, in vitro transcribed g2 gRNA and 180 bp ssODN and re-implanted into pseudo-pregnant females (FIG. 5A). Three litters of LbCpf1-edited mdx mice were analyzed by T7E1 assay and TseI RFLP (restriction fragment length polymorphism) (FIGS. 5B-C). Out of 24 pups born, 12 were T7E1 positive and 5 carried corrected alleles (mdx C1-C5), as detected by TseI RFLP and sequencing (FIGS. 5C-D). Skeletal muscles (tibialis anterior and gastrocnemius-plantaris) from WT, mdx and LbCpf1-corrected mdx-C mice were analyzed at 4 weeks of age. Hematoxylin and eosin (H&E) staining of muscle showed fibrosis and inflammatory infiltration in mdx muscle, whereas LbCpf1-corrected (mdx-C) muscle displayed normal muscle morphology and no signs of a dystrophic phenotype (FIG. 5E and FIGS. 7A-B). Immunohistochemistry showed absence of dystrophin-positive fibers in muscle sections of mdx mice, whereas mdx-C muscle corrected by LbCpf1-mediated HDR showed dystrophin protein expression in a majority of muscle fibers (FIG. 5F and FIGS. 7A-B). These findings show that LbCpf1-mediated editing of germline DNA can effectively prevent muscular dystrophy in mice.

### Example 3—Discussion

[0261] In this study, the inventors show that the newly discovered CRISPR-Cpf1 nuclease can efficiently correct DMD mutations in patient-derived iPSCs and mdx mice, allowing for restoration of dystrophin expression. Lack of dystrophin in DMD has been show to disrupt integrity of the sarcolemma, causing mitochondria dysfunction and oxidative stress (Millay et al., 2008; Mourkioti et al., 2013). They found increased mitochondrial DNA and higher oxygen consumption rates in LbCpf1-corrected iPSC-derived cardiomyocytes compared to uncorrected DMD iPSC-derived cardiomyocytes. Metabolic abnormalities of human DMD iPSC-derived cardiomyocytes were also rescued by Cpf1-mediated genomic editing. The inventors' findings also demonstrated the robustness and efficiency of Cpf1 in mouse genome editing. By using HDR-mediated correction, the ORF of the mouse Dmd gene was completely restored and pathophysiological hallmarks of the dystrophic phenotype such as fibrosis and inflammatory infiltration were also rescued.

[0262] Two different strategies—“reframing” and “exon skipping”—were applied to restore the ORF of the DMD gene using LbCpf1-mediated genome editing. Reframing creates small INDELs and restores the ORF by placing out-of-frame codons in-frame. Only one gRNA is required for reframing. Although the inventors did not observe any differences in subcellular localization between WT dystrophin protein and reframed dystrophin protein by immunocytochemistry, they observed differences in dystrophin expression level, mitochondrial DNA quantity, and oxygen consumption rate in separate edited clones, suggesting that reframed dystrophin may not be structurally or functionally identical to WT dystrophin.

[0263] Various issues should be considered with respect to the use of one or two gRNAs with Cpf1-editing. Here, the inventors show that two gRNAs are more effective than one gRNA for disruption of the splice acceptor site compared to reframing. When using two gRNAs, Cpf1-editing excises the intervening region and not only removes the splice acceptor site but can be designed to remove deleterious “AG” nucleotides, eliminating the possibility of generating a pseudo-splice acceptor site. However, with two gRNAs there is the necessity that both gRNAs cleave simultaneously, which may not occur. If only one of the two gRNAs cleaves, the desired deletion will not be generated. However, there remains the possibility that cleavage with one of the two gRNAs will generate INDELS at the targeted exon region, reframing the ORF, since in theory, one third of the INDELS will be in-frame. Using one gRNA to disrupt the splice acceptor site seems more efficient because it eliminates the need for two simultaneous cuts to occur. However, there is uncertainty with respect to the length of the INDEL generated by one gRNA-mediated editing. More importantly, with one gRNA there remains the possibility of leaving exonic “AG” nucleotides near the cleavage site, which can serve as an alternative pseudo-splice acceptor site.

[0264] With its unique T-rich PAM sequence, Cpf1 further expands the genome editing range of the CRISPR family, which is important for potential correction of other disease-related mutations since not all mutation sites contain G-rich PAM sequences for SpCas9 or PAMs for other Cas9 orthologues. Moreover, the staggered cut generated by Cpf1 may be also advantageous for NHEJ-mediated genome editing (Maresca et al., 2013). Finally, the LbCpf1 used in this study is 140-amino-acids smaller than the most widely used SpCas9, which would enhance packaging and delivery by AAV. To evaluate the targeting specificity of Cpf1, two groups (Kim et al., 2016; Tsai et al., 2016) determined the genome-wide editing efficiency of LbCpf1 and AsCpf1 by multiple methods. Both studies showed that LbCpf1 and AsCpf1 had high genome-wide targeting efficiency comparable to that of SpCas9 and high targeting specificity because LbCpf1 and AsCpf1 cannot tolerate mismatches at the 5′ PAM proximal region, lessening the frequency of off-targeting effect.

[0265] These findings show that Cpf1 is highly efficient in correcting human DMD and mouse Dmd mutations in vitro and in vivo. CRISPR-Cpf1-mediated genome editing represents a new and powerful approach to permanently eliminate genetic mutations and rescue abnormalities associated with DMD and other disorders.

[0266] All of the compositions and/or methods disclosed and claimed herein can be made and executed without undue experimentation in light of the present disclosure. While the compositions and methods of this disclosure have been described in terms of preferred embodiments, it will be apparent to those of skill in the art that variations may be applied to the compositions and/or methods and in the steps or in the sequence of steps of the method described herein without departing from the concept, spirit and scope of the disclosure. More specifically, it will be apparent that certain agents which are both chemically and physiologically related may be substituted for the agents described herein while the same or similar results would be achieved. All such similar substitutes and modifications apparent to those skilled in the art are deemed to be within the spirit, scope and concept of the disclosure as defined by the appended claims.

### VI. REFERENCES

[0267] The following references, to the extent that they provide exemplary procedural or other details supplementary to those set forth herein, are specifically incorporated herein by reference.
[0268] Angel et al., Mol. Cell. Biol., 7:2256, 1987a.
[0269] Angel et al., Cell, 49:729, 1987b.
[0270] Aartsma-Rus et al., Hum. Mutat. 30, 293-299, 2009.
[0271] Baichwal and Sugden, In: Gene Transfer, Kucherlapati (Ed), NY, Plenum Press, 117-148, 1986.
[0272] Banerji et al., Cell, 27(2 Pt 1):299-308, 1981.
[0273] Banerji et al., Cell, 33(3):729-740, 1983.
[0274] Barnes et al., J. Biol. Chem., 272(17):11510-7, 1997.
[0275] Baskin et al., EMBO Mol Med 6, 1610-1621, 2014.
[0276] Benvenisty and Neshif, Proc. Natl. Acad. Sci. USA, 83:9551-9555, 1986.
[0277] Berkhout et al., Cell, 59:273-282, 1989.
[0278] Bhavsar et al., Genomics, 35(1):11-23, 1996.
[0279] Bikard et al., Nucleic Acids Res. 41(15): 7429-7437, 2013.
[0280] Blanar et al., EMBO J., 8:1139, 1989.
[0281] Bodine and Ley, EMBO J., 6:2997, 1987.
[0282] Boshart et al., Cell, 41:521, 1985.
[0283] Bostick et al., Mol Ther 19, 1826-1832, 2011.
[0284] Bosze et al., EMBO J., 5(7):1615-1623, 1986.
[0285] Braddock et al., Cell, 58:269, 1989.
[0286] Bulla and Siddiqui, J. Virol., 62:1437, 1986.
[0287] Burridge et al., Nat. Methods 11, 855-860, 2014.
[0288] Bushby et al., Lancet Neurol., 9(1): 77-93 (2010).
[0289] Bushby et al., Lancet Neurol., 9(2): 177-198 (2010).
[0290] Campbell & Kahl, Nature 338, 259-262, 1989.
[0291] Campbell and Villarreal, Mol. Cell. Biol., 8:1993, 1988.
[0292] Campere and Tilghman, Genes and Dev., 3:537, 1989.
[0293] Campo et al., Nature, 303:77, 1983.
[0294] Celander and Haseltine, J. Virology, 61:269, 1987.
[0295] Celander et al., J. Virology, 62:1314, 1988.
[0296] Chandler et al., Cell, 33:489, 1983.
[0297] Chang et al., Mol. Cell. Biol., 9:2153, 1989.
[0298] Chang et al., Stem Cells., 27:1042-1049, 2009.
[0299] Chatterjee et al., Proc. Natl. Acad. Sci. USA, 86:9114, 1989.
[0300] Chen and Okayama, Mol. Cell Biol., 7:2745-2752, 1987.
[0301] Cho et al., Nat. Biotechnol. 31(3): 230-232, 2013.
[0302] Choi et al., Cell, 53:519, 1988.
[0303] Cirak et al., The Lancet 378, 595-605, 2011.
[0304] Coffin, In: Virology, Fields et al. (Eds.), Raven Press, NY, 1437-1500, 1990.
[0305] Cohen et al., J. Cell. Physiol., 5:75, 1987.
[0306] Costa et al., Mol. Cell. Biol., 8:81, 1988.
[0307] Couch et al., Am. Rev. Resp. Dis., 88:394-403, 1963.
[0308] Coupar et al., Gene, 68:1-10, 1988.
[0309] Cripe et al., EMBO J., 6:3745, 1987.
[0310] Culotta and Hamer, Mol. Cell. Biol., 9:1376, 1989.
[0311] Dandolo et al., J. Virology, 47:55-64, 1983.
[0312] De Villiers et al., Nature, 312(5991):242-246, 1984.
[0313] Deschamps et al., Science, 230:1174-1177, 1985.
[0314] DeWitt et al., Sci Transl Med 8, 360ra134-360ra134, 2016.
[0315] Donnelly et al., J. Gen. Virol. 82, 1027-1041, 2001.
[0316] Dubensky et al., Proc. Natl. Acad. Sci. USA, 81:7529-7533, 1984.
[0317] Edbrooke et al., Mol. Cell. Biol., 9:1908, 1989.
[0318] Edlund et al., Science, 230:912-916, 1985.
[0319] EP 0273085
[0320] Fechheimer et al., Proc Natl. Acad. Sci. USA, 84:8463-8467, 1987.
[0321] Feng and Holland, Nature, 334:6178, 1988.
[0322] Ferkol et al., FASEB J., 7:1081-1091, 1993.
[0323] Firak and Subramanian, Mol. Cell. Biol., 6:3667, 1986.
[0324] Foecking and Hofstetter, Gene, 45(1):101-105, 1986.
[0325] Fonfara et al., Nature 532, 517-521, 2016.
[0326] Fraley et al., Proc Natl. Acad. Sci. USA, 76:3348-3352, 1979 Franz et al., Cardoscience, 5(4):235-43, 1994.
[0327] Friedmann, Science, 244:1275-1281, 1989.
[0328] Fujita et al., Cell, 49:357, 1987.
[0329] Ghosh and Bachhawat, In: Liver Diseases, Targeted Diagnosis and Therapy Using Specific Receptors and Ligands, Wu et al. (Eds.), Marcel Dekker, NY, 87-104, 1991.
[0330] Ghosh-Choudhury et al., EMBO J., 6:1733-1739, 1987.
[0331] Gilles et al., Cell, 33:717, 1983.
[0332] Gloss et al., EMBO J., 6:3735, 1987.
[0333] Godbout et al., Mol. Cell. Biol., 8:1169, 1988.
[0334] Gomez-Foix et al., J. Biol. Chem., 267:25129-25134, 1992.
[0335] Goncalves et al., Mol Ther, 19(7): 1331-1341 (2011).
[0336] Goodbourn and Maniatis, Proc. Natl. Acad. Sci. USA, 85:1447, 1988.
[0337] Goodbourn et al., Cell, 45:601, 1986.
[0338] Gopal, Mol. Cell Biol., 5:1188-1190, 1985.
[0339] Gopal-Srivastava et al., J. Mol. Cell. Biol., 15(12):7081-90, 1995.
[0340] Graham and Prevec, In: Methods in Molecular Biology: Gene Transfer and Expression Protocol, Murray (Ed.), Humana Press, Clifton, N.J., 7:109-128, 1991.
[0341] Graham and van der Eb, Virology, 52:456-467, 1973.
[0342] Graham et al., J. Gen. Virol., 36:59-72, 1977.
[0343] Greene et al., Immunology Today, 10:272, 1989
[0344] Grosschedl and Baltimore, Cell, 41:885, 1985.
[0345] Grunhaus and Horwitz, Seminar in Virology, 3:237-252, 1992.
[0346] Harland and Weintraub, J. Cell Biol., 101:1094-1099, 1985.
[0347] Haslinger and Karin, Proc. Natl. Acad. Sci. USA, 82:8572, 1985.
[0348] Hauber and Cullen, J. Virology, 62:673, 1988.
[0349] Hen et al., Nature, 321:249, 1986.
[0350] Hensel et al., Lymphokine Res., 8:347, 1989.
[0351] Hermonat and Muzycska, Proc. Nat'l Acad. Sci. USA, 81:6466-6470, 1984.
[0352] Herr and Clarke, Cell, 45:461, 1986.
[0353] Hersdorffer et al., DNA Cell Biol., 9:713-723, 1990.
[0354] Herz and Gerard, Proc. Nat'l. Acad. Sci. USA 90:2812-2816, 1993.
[0355] Hirochika et al., J. Virol., 61:2599, 1987.
[0356] Holbrook et al., Virology, 157:211, 1987.
[0357] Hollinger & Chamberlain, Current Opinion in Neurology 28, 522-527, 2015.
[0358] Horlick and Benfield, Mol. Cell. Biol., 9:2396, 1989.
[0359] Horwich et al., J. Virol., 64:642-650, 1990.
[0360] Hsu et al., Natl Biotechnol. 31:827-832, 2013
[0361] Huang et al., Cell, 27:245, 1981.
[0362] Hug et al., Mol. Cell. Biol., 8:3065, 1988.
[0363] Hwang et al., Mol. Cell. Biol., 10:585, 1990.
[0364] Imagawa et al., Cell, 51:251, 1987.
[0365] Imbra and Karin, Nature, 323:555, 1986.
[0366] Imler et al., Mol. Cell. Biol., 7:2558, 1987.
[0367] Imperiale and Nevins, Mol. Cell. Biol., 4:875, 1984.
[0368] Jakobovits et al., Mol. Cell. Biol., 8:2555, 1988.
[0369] Jameel and Siddiqui, Mol. Cell. Biol., 6:710, 1986.
[0370] Jaynes et al., Mol. Cell. Biol., 8:62, 1988.
[0371] Jinek et al., Science 337, 816-821, 2012.
[0372] Johnson et al., Mol. Cell. Biol., 9:3393, 1989.
[0373] Jones and Shenk, Cell, 13:181-188, 1978.
[0374] Kadesch and Berg, Mol. Cell. Biol., 6:2593, 1986.
[0375] Kaneda et al., Science, 243:375-378, 1989.
[0376] Karin et al., Mol. Cell. Biol., 7:606, 1987.
[0377] Karlsson et al., EMBO J., 5:2377-2385, 1986.
[0378] Katinka et al., Cell, 20:393, 1980.
[0379] Kato et al., J Biol Chem., 266(6):3361-3364, 1991.
[0380] Kawamoto et al., Mol. Cell. Biol., 8:267, 1988.
[0381] Kelly et al., J. Cell Biol., 129(2):383-96, 1995.
[0382] Kiledjian et al., Mol. Cell. Biol., 8:145, 1988.
[0383] Kim et al., Nature Biotechnology, 1-2, 2016.
[0384] Kim et al., Nature Biotechnology 34, 876-881, 2016.
[0385] Kimura et al., Dev. Growth Differ., 39(3):257-65, 1997.
[0386] Klamut et al., Mol. Cell. Biol., 10:193, 1990.
[0387] Klein et al., Nature, 327:70-73, 1987.
[0388] Koch et al., Mol. Cell. Biol., 9:303, 1989.
[0389] Kriegler and Botchan, In: Eukaryotic Viral Vectors, Gluzman (Ed.), Cold Spring Harbor: Cold Spring Harbor Laboratory, N Y, 1982.
[0390] Kriegler and Botchan, Mol. Cell. Biol., 3:325, 1983.
[0391] Kriegler et al., Cell, 38:483, 1984.
[0392] Kriegler et al., Cell, 53:45, 1988.
[0393] Kuhl et al., Cell, 50:1057, 1987.
[0394] Kunz et al., Nucl. Acids Res., 17:1121, 1989.
[0395] LaPointe et al., Hypertension, 27(3):715-22, 1996
[0396] LaPointe et al., J. Biol. Chem., 263(19):9075-8, 1988.
[0397] Larsen et al., Proc. Natl. Acad. Sci. USA., 83:8283, 1986.
[0398] Laspia et al., Cell, 59:283, 1989.
[0399] Latimer et al., Mol. Cell. Biol., 10:760, 1990.
[0400] Le Gal La Salle et al., Science, 259:988-990, 1993.
[0401] Lee et al., Nature, 294:228, 1981.
[0402] Levinson et al., Nature, 295:79, 1982.
[0403] Levrero et al., Gene, 101:195-202, 1991.
[0404] Lin et al., Mol. Cell. Biol., 10:850, 1990.
[0405] Long et al., Science 345:1184-1188, 2014.
[0406] Long et al., Genome Editing of Monogenic Neuromuscular Diseases: A Systematic Review. JAMA Neurol, doi:10.1001/jamaneurol.2016.3388, 2016.
[0407] Long et al., Science 351, 400-403, 2016.
[0408] Luria et al., EMBO J., 6:3307, 1987.
[0409] Lusky and Botchan, Proc. Natl. Acad. Sci. USA, 83:3609, 1986.
[0410] Lusky et al., Mol. Cell. Biol., 3:1108, 1983.
[0411] Majors and Varmus, Proc. Natl. Acad. Sci. USA, 80:5866, 1983.
[0412] Mali et al., Science 339, 823-826, 2013a.
[0413] Mali et al., Nat Methods 10, 957-963, 2013b.
[0414] Mali et al., Nat. Biotechnol. 31:833-838, 2013c.
[0415] Mann et al., Cell, 33:153-159, 1983.
[0416] Maresca et al., Genome Research 23, 539-546, 2013.
[0417] Markowitz et al., J. Virol., 62:1120-1124, 1988.
[0418] Martari, M., et al. Hum Gene Ther, 20(7):759-766 (2009).
[0419] McNeall et al., Gene, 76:81, 1989.
[0420] Miksicek et al., Cell, 46:203, 1986.
[0421] Millay et al., Nat. Med. 14, 442-447, 2008.
[0422] Mojica et al., J. Mol. Evol. 60, 174-182, 2005.
[0423] Mordacq and Linzer, Genes and Dev., 3:760, 1989.
[0424] Moreau et al., Nucl. Acids Res., 9:6047, 1981.
[0425] Moss et al., J. Gen. Physiol., 108(6):473-84, 1996.
[0426] Mourkioti et al., Nature Cell Biology 15, 895-904, 2013.
[0427] Muesing et al., Cell, 48:691, 1987.
[0428] Nelson et al., Science 351, 403-407, 2016.
[0429] Nicolas and Rubinstein, In: Vectors: A survey of molecular cloning vectors and their uses, Rodriguez and Denhardt (Eds.), Stoneham: Butterworth, 494-513, 1988.
[0430] Nicolau and Sene, Biochim. Biophys. Acta, 721:185-190, 1982.
[0431] Nicolau et al., Methods Enzymol., 149:157-176, 1987.
[0432] Ondek et al., EMBO J., 6:1017, 1987.
[0433] Ornitz et al., Mol. Cell. Biol., 7:3466, 1987.
[0434] Padgett, R. A., Trends Genet. 28, 147-154, 2012.
[0435] Palmiter et al., Cell, 29:701, 1982a.
[0436] Palmiter et al., Nature, 300:611, 1982b.
[0437] Paskind et al., Virology, 67:242-248, 1975.
[0438] Pech et al., Mol. Cell. Biol., 9:396, 1989.
[0439] Perales et al., Proc. Natl. Acad. Sci. USA, 91(9):4086-4090, 1994.
[0440] Perez-Stable and Constantini, Mol. Cell. Biol., 10:1116, 1990.
[0441] Picard and Schaffner, Nature, 307:83, 1984.
[0442] Pinkert et al., Genes and Dev., 1:268, 1987.
[0443] Ponta et al., Proc. Natl. Acad. Sci. USA, 82:1020, 1985.
[0444] Porton et al., Mol. Cell. Biol., 10:1076, 1990.
[0445] Potter et al., Proc. Natl. Acad. Sci. USA, 81:7161-7165, 1984.
[0446] Queen and Baltimore, Cell, 35:741, 1983.
[0447] Quinn et al., Mol. Cell. Biol., 9:4713, 1989.
[0448] Racher et al., Biotech. Techniques, 9:169-174, 1995.
[0449] Ragot et al., Nature, 361:647-650, 1993.
[0450] Ran et al., Nature 520, 186-191, 2015.
[0451] Redondo et al., Science, 247:1225, 1990.
[0452] Reisman and Rotter, Mol. Cell. Biol., 9:3571, 1989.
[0453] Renan, Radiother. Oncol., 19:197-218, 1990.
[0454] Resendez Jr. et al., Mol. Cell. Biol., 8:4579, 1988.
[0455] Rich et al., Hum. Gene Ther., 4:461-476, 1993.
[0456] Ridgeway, In: Vectors: A survey of molecular cloning vectors and their uses, Stoneham: Butterworth, 467-492, 1988.
[0457] Ripe et al., Mol. Cell. Biol., 9:2224, 1989.
[0458] Rippe et al., Mol. Cell Biol., 10:689-695, 1990.
[0459] Rittling et al., Nuc. Acids Res., 17:1619, 1989.
[0460] Rosen et al., Cell, 41:813, 1988.
[0461] Rosenfeld et al., Cell, 68:143-155, 1992.
[0462] Rosenfeld et al., Science, 252:431-434, 1991.
[0463] Roux et al., Proc. Natl. Acad. Sci. USA, 86:9079-9083, 1989.
[0464] Sakai et al., Genes and Dev., 2:1144, 1988.
[0465] Satake et al., J. Virology, 62:970, 1988.
[0466] Schaffner et al., J. Mol. Biol., 201:81, 1988.
[0467] Searle et al., Mol. Cell. Biol., 5:1480, 1985.
[0468] Sharp and Marciniak, Cell, 59:229, 1989.
[0469] Shaul and Ben-Levy, EMBO J., 6:1913, 1987.
[0470] Sherman et al., Mol. Cell. Biol., 9:50, 1989.
[0471] Shimizu-Motohashi et al., Am J Transl Res 8, 2471-2489, 2016.
[0472] Sleigh and Lockett, J. EMBO, 4:3831, 1985.
[0473] Spalholz et al., Cell, 42:183, 1985.
[0474] Spandau and Lee, J. Virology, 62:427, 1988.
[0475] Spandidos and Wilkie, EMBO J., 2:1193, 1983.
[0476] Stephens and Hentschel, Biochem. J., 248:1, 1987.
[0477] Stratford-Perricaudet and Perricaudet, In: Human Gene Transfer, Cohen-Haguenauer and Boiron (Eds.), John Libbey Eurotext, France, 51-61, 1991.
[0478] Stratford-Perricaudet et al., Hum. Gene. Ther., 1:241-256, 1990.
[0479] Stuart et al., Nature, 317:828, 1985.
[0480] Sullivan and Peterlin, Mol. Cell. Biol., 7:3315, 1987.
[0481] Swartzendruber and Lehman, J. Cell. Physiology, 85:179, 1975.
[0482] Tabebordbar et al., Science 351, 407-411, 2016.
[0483] Takebe et al., Mol. Cell. Biol., 8:466, 1988.
[0484] Tavernier et al., Nature, 301:634, 1983.
[0485] Taylor and Kingston, Mol. Cell. Biol., 10:165, 1990a.
[0486] Taylor and Kingston, Mol. Cell. Biol., 10:176, 1990b.
[0487] Taylor et al., J. Biol. Chem., 264:15160, 1989.
[0488] Temin, In: Gene Transfer, Kucherlapati (Ed.), NY, Plenum Press, 149-188, 1986.
[0489] Thiesen et al., J. Virology, 62:614, 1988.
[0490] Top et al., J. Infect. Dis., 124:155-160, 1971.
[0491] Tóth et al., Biology Direct, 1-14, 2016.
[0492] Tronche et al., Mol. Biol. Med., 7:173, 1990.
[0493] Trudel and Constantini, Genes and Dev. 6:954, 1987.
[0494] Tsai et al., Nature Biotechnology 34, 882-887, 2016.
[0495] Tur-Kaspa et al., Mol. Cell Biol., 6:716-718, 1986.
[0496] Tyndell et al., Nuc. Acids. Res., 9:6231, 1981.
[0497] Vannice and Levinson, J. Virology, 62:1305, 1988.
[0498] Varmus et al., Cell, 25:23-36, 1981.
[0499] Vasseur et al., Proc Natl. Acad. Sci. U.S.A., 77:1068, 1980.
[0500] Wagner et al., Proc. Natl. Acad. Sci. USA, 87(9):3410-3414, 1990.
[0501] Wang et al., Cell, 153:910-910, 2013.
[0502] Weber et al., Cell, 36:983, 1984.
[0503] Weinberger et al. Mol. Cell. Biol., 8:988, 1984.
[0504] Winoto and Baltimore, Cell, 59:649, 1989.
[0505] Wong et al., Gene, 10:87-94, 1980.
[0506] Wu and Wu, Adv. Drug Delivery Rev., 12:159-167, 1993.
[0507] Wu and Wu, Biochemistry, 27:887-892, 1988.
[0508] Wu and Wu, J. Biol. Chem., 262:4429-4432, 1987.
[0509] Wu et al., Cell Stem Cell 13, 659-662, 2013.
[0510] Wu et al., Nat Biotechnol 32, 670-676, 2014.
[0511] Xu et al., Mol Ther 24, 564-569, 2016.
[0512] Yamauchi-Takihara et al., Proc. Natl. Acad. Sci. USA, 86(10):3504-3508, 1989.
[0513] Yang et al., Proc. Natl. Acad. Sci. USA, 87:9568-9572, 1990.
[0514] Yin et al., Nat Biotechnol 32, 551-553, 2014.
[0515] Yin et al., Physiol Rev 93, 23-67, 2013.
[0516] Young et al., Cell Stem Cell 18, 533-540, 2016.
[0517] Yutzey et al. Mol. Cell. Biol., 9:1397, 1989.
[0518] Zechner et al., Cell Metabolism 12, 633-642, 2010.
[0519] Zelenin et al., FEBS Lett., 280:94-96, 1991.
[0520] Zetsche et al., Cell 163, 759-771, 2015.
[0521] Ziober and Kramer, J. Bio. Chem., 271(37):22915-22922, 1996.

The application's sequence listing, which the Patent Office published only in electronic form, follows.

SEQUENCE LISTING (835 sequences)

SEQ ID NO: 1 - DNA, 25 bp, Artificial Sequence
  source: /note="Description of Artificial Sequence: Synthetic primer"
cccagaagagcaagataaacttgaa

SEQ ID NO: 2 - DNA, 22 bp, Artificial Sequence
  source: /note="Description of Artificial Sequence: Synthetic primer"
ctctgttccaaatcctgcttgt

SEQ ID NO: 3 - DNA, 22 bp, Artificial Sequence
  source: /note="Description of Artificial Sequence: Synthetic primer"
cgccacatctaccatcaccctc

SEQ ID NO: 4 - DNA, 21 bp, Artificial Sequence
  source: /note="Description of Artificial Sequence: Synthetic primer"
cggctaggctagaggtggcta

SEQ ID NO: 5 - DNA, 22 bp, Artificial Sequence
  source: /note="Description of Artificial Sequence: Synthetic primer"
gagtatgcagaagccccgagtc

SEQ ID NO: 6 - DNA, 24 bp, Artificial Sequence
  source: /note="Description of Artificial Sequence: Synthetic primer"
tcaacatgcccaactggtttctgg

SEQ ID NO: 7 - DNA, 180 bp, Artificial Sequence
  source: /note="Description of Artificial Sequence: Synthetic polynucleotide"
tgatatgaatgaaactcatcaaatatgcgtgttagtgtaaatgaacttctatttaattttgaggctctgcaaagttctttaaaggagcagcagaatggcttcaactatctgagtgacactgtgaaggagatggccaagaaagcaccttcagaaatatgccagaaatatctgtcagaattt

SEQ ID NO: 8 - DNA, 41 bp, Artificial Sequence
  source: /note="Description of Artificial Sequence: Synthetic primer"
tttttttcaggttggaccggtgccaccatgagcaagctgga

SEQ ID NO: 9 - DNA, 26 bp, Artificial Sequence
  source: /note="Description of Artificial Sequence: Synthetic primer"
tggggttatagtaggccatccacttc

SEQ ID NO: 10 - DNA, 23 bp, Artificial Sequence
  source: /note="Description of Artificial Sequence: Synthetic primer"
gatggcctactataaccccagcg

SEQ ID NO: 11 - DNA, 23 bp, Artificial Sequence
  source: /note="Description of Artificial Sequence: Synthetic primer"
ggcatagtcggggacatcatatg

SEQ ID NO: 12 - DNA, 42 bp, Artificial Sequence
  source: /note="Description of Artificial Sequence: Synthetic primer"
tttttttcaggttggaccggtgccaccatgacacagttcgag

SEQ ID NO: 13 - DNA, 26 bp, Artificial Sequence
  source: /note="Description of Artificial Sequence: Synthetic primer"
tccttctcaggattgttcaggtcgta

SEQ ID NO: 14 - DNA, 23 bp, Artificial Sequence
  source: /note="Description of Artificial Sequence: Synthetic primer"
ctgaacaatcctgagaaggagcc

SEQ ID NO: 15 - DNA, 40 bp, Artificial Sequence
  source: /note="Description of Artificial Sequence: Synthetic primer"
atgatgtccccgactatgccgaattcggcagtggagaggg

SEQ ID NO: 16 - DNA, 30 bp, Artificial Sequence
  source: /note="Description of Artificial Sequence: Synthetic primer"
agcgagctctagttagaattccttgtacag

SEQ ID NO: 17 - DNA, 37 bp, Artificial Sequence
  source: /note="Description of Artificial Sequence: Synthetic primer"
caccagcgctgcttaatacgactcactatagggaaat

SEQ ID NO: 18 - DNA, 33 bp, Artificial Sequence
  source: /note="Description of Artificial Sequence: Synthetic primer"
agtagcgcttctagaccctcacttcctactcag

SEQ ID NO: 19 - DNA, 50 bp, Artificial Sequence
  source: /note="Description of Artificial Sequence: Synthetic primer"
agaagaaatataagactcgaggccaccatgagcaagctggagaagtttac

SEQ ID NO: 20 - DNA, 21 bp, Artificial Sequence
  source: /note="Description of Artificial Sequence: Synthetic primer"
tggggttatagtaggccatcc

SEQ ID NO: 21 - DNA, 47 bp, Artificial Sequence
  source: /note="Description of Artificial Sequence: Synthetic primer"
cccgcagaaggcagcgtcgacttaggcatagtcggggacatcatatg

SEQ ID NO: 22 - DNA, 50 bp, Artificial Sequence
  source: /note="Description of Artificial Sequence: Synthetic primer"
agaagaaatataagactcgaggccaccatgacacagttcgagggctttac

SEQ ID NO: 23 - DNA, 57 bp, Artificial Sequence
  source: /note="Description of Artificial Sequence: Synthetic primer"
caccgtaatttctactaagtgtagatgctcctactcagactgttactctgttttttt

SEQ ID NO: 24 - DNA, 57 bp, Artificial Sequence
  source: /note="Description of Artificial Sequence: Synthetic primer"
aaacaaaaaaacagagtaacagtctgagtaggagcatctacacttagtagaaattac

SEQ ID NO: 25 - DNA, 57 bp, Artificial Sequence
  source: /note="Description of Artificial Sequence: Synthetic primer"
caccgtaatttctactaagtgtagattaccatgtattgctaaacaaagtattttttt

SEQ ID NO: 26 - DNA, 57 bp, Artificial Sequence
  source: /note="Description of Artificial Sequence: Synthetic primer"
aaacaaaaaaatactttgtttagcaatacatggtaatctacacttagtagaaattac

SEQ ID NO: 27 - DNA, 57 bp, Artificial Sequence
  source: /note="Description of Artificial Sequence: Synthetic primer"
caccgtaatttctactaagtgtagatattgaagagtaacaatttgagccattttttt

SEQ ID NO: 28 - DNA, 57 bp, Artificial Sequence
  source: /note="Description of Artificial Sequence: Synthetic primer"
aaacaaaaaaatggctcaaattgttactcttcaatatctacacttagtagaaattac

SEQ ID NO: 29 - DNA, 56 bp, Artificial Sequence
  source: /note="Description of Artificial Sequence: Synthetic primer"
caccgtaatttctactcttgtagatgctcctactcagactgttactctgttttttt

SEQ ID NO: 30 - DNA, 56 bp, Artificial Sequence
  source: /note="Description of Artificial Sequence: Synthetic primer"
aaacaaaaaaacagagtaacagtctgagtaggagcatctacaagagtagaaattac

SEQ ID NO: 31 - DNA, 18 bp, Artificial Sequence
  source: /note="Description of Artificial Sequence: Synthetic primer"
ttccctggcaaggtctga

SEQ ID NO: 32 - DNA, 19 bp, Artificial Sequence
  source: /note="Description of Artificial Sequence: Synthetic primer"
atcctcaaggtcacccacc

SEQ ID NO: 33 - DNA, 23 bp, Artificial Sequence
  source: /note="Description of Artificial Sequence: Synthetic primer"
ctctgttccaaatcctgcattgt

SEQ ID NO: 34 - DNA, 57 bp, Artificial Sequence
  source: /note="Description of Artificial Sequence: Synthetic primer"
caccgtaatttctactaagtgtagataggctctgcaaagttctttgaaagttttttt

SEQ ID NO: 35 - DNA, 57 bp, Artificial Sequence
  source: /note="Description of Artificial Sequence: Synthetic primer"
aaacaaaaaaactttcaaagaactttgcagagcctatctacacttagtagaaattac

SEQ ID NO: 36 - DNA, 57 bp, Artificial Sequence
  source: /note="Description of Artificial Sequence: Synthetic primer"
caccgtaatttctactaagtgtagataaagagcaacaaaatggcttcaacttttttt

SEQ ID NO: 37 - DNA, 57 bp, Artificial Sequence
  source: /note="Description of Artificial Sequence: Synthetic primer"
aaacaaaaaaagttgaagccattttgttgctctttatctacacttagtagaaattac

SEQ ID NO: 38 - DNA, 57 bp, Artificial Sequence
  source: /note="Description of Artificial Sequence: Synthetic primer"
caccgtaatttctactaagtgtagataaagagcaataaaatggcttcaacttttttt

SEQ ID NO: 39 - DNA, 57 bp, Artificial Sequence
  source: /note="Description of Artificial Sequence: Synthetic primer"
aaacaaaaaaagttgaagccattttattgctctttatctacacttagtagaaattac

SEQ ID NO: 40 - DNA, 57 bp, Artificial Sequence
  source: /note="Description of Artificial Sequence: Synthetic primer"
caccgtaatttctactaagtgtagataaagaactttgcagagcctcaaaattttttt

SEQ ID NO: 41 - DNA, 57 bp, Artificial Sequence
  source: /note="Description of Artificial Sequence: Synthetic primer"
aaacaaaaaaattttgaggctctgcaaagttctttatctacacttagtagaaattac

SEQ ID NO: 42 - DNA, 57 bp, Artificial Sequence
  source: /note="Description of Artificial Sequence: Synthetic primer"
caccgtaatttctactaagtgtagatctgaatatctatgcattaataactttttttt

SEQ ID NO: 43 - DNA, 57 bp, Artificial Sequence
  source: /note="Description of Artificial Sequence: Synthetic primer"
aaacaaaaaaaagttattaatgcatagatattcagatctacacttagtagaaattac

SEQ ID NO: 44 - DNA, 57 bp, Artificial Sequence
  source: /note="Description of Artificial Sequence: Synthetic primer"
caccgtaatttctactaagtgtagattattatattacagggcatattatattttttt

SEQ ID NO: 45 - DNA, 57 bp, Artificial Sequence
  source: /note="Description of Artificial Sequence: Synthetic primer"
aaacaaaaaaatataatatgccctgtaatataataatctacacttagtagaaattac

SEQ ID NO: 46 - DNA, 57 bp, Artificial Sequence
  source: /note="Description of Artificial Sequence: Synthetic primer"
caccgtaatttctactaagtgtagataggtaagccgaggtttggcctttattttttt

SEQ ID NO: 47 - DNA, 57 bp, Artificial Sequence
  source: /note="Description of Artificial Sequence: Synthetic primer"
aaacaaaaaaataaaggccaaacctcggcttacctatctacacttagtagaaattac

SEQ ID NO: 48 - DNA, 57 bp, Artificial Sequence
  source: /note="Description of Artificial Sequence: Synthetic primer"
caccgtaatttctactaagtgtagatcccagagtccttcaaagatattgattttttt

SEQ ID NO: 49 - DNA, 57 bp, Artificial Sequence
  source: /note="Description of Artificial Sequence: Synthetic primer"
aaacaaaaaaatcaatatctttgaaggactctgggatctacacttagtagaaattac

SEQ ID NO: 50 - DNA, 47 bp, Artificial Sequence
  source: /note="Description of Artificial Sequence: Synthetic primer"
gaattgtaatacgactcactatagggtaatttctactaagtgtagat

SEQ ID NO: 51 - DNA, 45 bp, Artificial Sequence
  source: /note="Description of Artificial Sequence: Synthetic primer"
ctttcaaagaactttgcagagcctatctacacttagtagaaatta

SEQ ID NO: 52 - DNA, 45 bp, Artificial Sequence
  source: /note="Description of Artificial Sequence: Synthetic primer"
gttgaagccattttattgctctttatctacacttagtagaaatta

SEQ ID NO: 53 - DNA, 45 bp, Artificial Sequence
  source: /note="Description of Artificial Sequence: Synthetic primer"
ttttgaggctctgcaaagttctttatctacacttagtagaaatta

SEQ ID NO: 54 - DNA, 57 bp, Artificial Sequence
  source: /note="Description of Artificial Sequence: Synthetic primer"
tataatatgccctgtaatataataatctacacttagtagaaattaccctatagtgag

SEQ ID NO: 55 - DNA, 57 bp, Artificial Sequence
  source: /note="Description of Artificial Sequence: Synthetic primer"
tcaatatctttgaaggactctgggatctacacttagtagaaattaccctatagtgag

SEQ ID NO: 56 - DNA, 27 bp, Artificial Sequence
  source: /note="Description of Artificial Sequence: Synthetic primer"
gagaaacttctgtgatgtgaggacata

SEQ ID NO: 57 - DNA, 22 bp, Artificial Sequence
  source: /note="Description of Artificial Sequence: Synthetic primer"
caaacctcggcttacctgaaat

SEQ ID NO: 58 - DNA, 27 bp, Artificial Sequence
  source: /note="Description of Artificial Sequence: Synthetic primer"
caatatctttgaaggactctgggtaaa

SEQ ID NO: 59 - DNA, 27 bp, Artificial Sequence
  source: /note="Description of Artificial Sequence: Synthetic primer"
aattaatagaagtcaatgtagggaagg

SEQ ID NO: 60 - DNA, 24 bp, Homo sapiens
tctttttcttcttttttccttttt

SEQ ID NO: 61 - DNA, 24 bp, Homo sapiens
ctttttcttcttttttcctttttg

SEQ ID NO: 62 - DNA, 24 bp, Homo sapiens
tttttcttcttttttcctttttgc

SEQ ID NO: 63 - DNA, 24 bp, Homo sapiens
tcttcttttttcctttttgcaaaa

SEQ ID NO: 64 - DNA, 24 bp, Homo sapiens
cttcttttttcctttttgcaaaaa

SEQ ID NO: 65 - DNA, 24 bp, Homo sapiens
ttcttttttcctttttgcaaaaac

SEQ ID NO: 66 - DNA, 24 bp, Homo sapiens
ttcctttttgcaaaaacccaaaat

SEQ ID NO: 67 - DNA, 24 bp, Homo sapiens
tcctttttgcaaaaacccaaaata

SEQ ID NO: 68 - DNA, 24 bp, Homo sapiens
cctttttgcaaaaacccaaaatat

SEQ ID NO: 69 - DNA, 24 bp, Homo sapiens
ctttttgcaaaaacccaaaatatt

SEQ ID NO: 70 - DNA, 24 bp, Homo sapiens
tgcaaaaacccaaaatattttagc

SEQ ID NO: 71 - DNA, 24 bp, Homo sapiens
gcaaaaacccaaaatattttagct

SEQ ID NO: 72 - DNA, 24 bp, Homo sapiens
caaaaacccaaaatattttagctc

SEQ ID NO: 73 - DNA, 24 bp, Homo sapiens
agctcctactcagactgttactct

SEQ ID NO: 74 - DNA, 24 bp, Homo sapiens
gctcctactcagactgttactctg

SEQ ID NO: 75 - DNA, 24 bp, Homo sapiens
cttagtaaccacaggttgtgtcac

SEQ ID NO: 76 - DNA, 24 bp, Homo sapiens
gagatggcagtttccttagtaacc

SEQ ID NO: 77 - DNA, 24 bp, Homo sapiens
tagtttggagatggcagtttcctt

SEQ ID NO: 78 - DNA, 24 bp, Homo sapiens
ttctcataccttctgcttgatgat

SEQ ID NO: 79 - DNA, 24 bp, Homo sapiens
tcattttttctcataccttctgct

SEQ ID NO: 80 - DNA, 24 bp, Homo sapiens
atcattttttctcataccttctgc

SEQ ID NO: 81 - DNA, 24 bp, Homo sapiens
aagaaaaacttctgccaactttta

SEQ ID NO: 82 - DNA, 24 bp, Homo sapiens
aaagaaaaacttctgccaactttt

SEQ ID NO: 83 - DNA, 24 bp, Homo sapiens
tctttaaaatgaagattttccacc

SEQ ID NO: 84 - DNA, 24 bp, Homo sapiens
ctttaaaatgaagattttccacca

SEQ ID NO: 85 - DNA, 24 bp, Homo sapiens
tttaaaatgaagattttccaccaa

SEQ ID NO: 86 - DNA, 24 bp, Homo sapiens
aaatgaagattttccaccaatcac

SEQ ID NO: 87 - DNA, 24 bp, Homo sapiens
ccaccaatcactttactctcctag

SEQ ID NO: 88 - DNA, 24 bp, Homo sapiens
caccaatcactttactctcctaga

SEQ ID NO: 89 - DNA, 24 bp, Homo sapiens
ctctcctagaccatttcccaccag

SEQ ID NO: 90 - DNA, 24 bp, Homo sapiens
agaaaagattaaacagtgtgctac

SEQ ID NO: 91 - DNA, 24 bp, Homo sapiens
tttgagaaaagattaaacagtgtg

SEQ ID NO: 92 - DNA, 24 bp, Homo sapiens
atttgagaaaagattaaacagtgt

SEQ ID NO: 93 - DNA, 24 bp, Homo sapiens
tatttgagaaaagattaaacagtg

SEQ ID NO: 94 - DNA, 24 bp, Homo sapiens
atcttttctcaaataaaaagacat

SEQ ID NO: 95 - DNA, 24 bp, Homo sapiens
ctcaaataaaaagacatggggctt

SEQ ID NO: 96 - DNA, 24 bp, Homo sapiens
tcaaataaaaagacatggggcttc

SEQ ID NO: 97 - DNA, 24 bp, Homo sapiens
tgttttgcctttttggtatcttac

SEQ ID NO: 98 - DNA, 24 bp, Homo sapiens
gttttgcctttttggtatcttaca

SEQ ID NO: 99 - DNA, 24 bp, Homo sapiens
ttttgcctttttggtatcttacag

SEQ ID NO: 100 - DNA, 24 bp, Homo sapiens
gcctttttggtatcttacaggaac

SEQ ID NO: 101 - DNA, 24 bp, Homo sapiens
cctttttggtatcttacaggaact

SEQ ID NO: 102 - DNA, 24 bp, Homo sapiens
tggtatcttacaggaactccagga

SEQ ID NO: 103 - DNA, 24 bp, Homo sapiens
ggtatcttacaggaactccaggat

SEQ ID NO: 104 - DNA, 24 bp, Homo sapiens
aggattgctgaattatttcttccc

SEQ ID NO: 105 - DNA, 24 bp, Homo sapiens
gaggattgctgaattatttcttcc

SEQ ID NO: 106 - DNA, 24 bp, Homo sapiens
tgaggattgctgaattatttcttc

SEQ ID NO: 107 - DNA, 24 bp, Homo sapiens
ctgtagaatactggcatctgtttt

SEQ ID NO: 108 - DNA, 24 bp, Homo sapiens
cctgtagaatactggcatctgttt

SEQ ID NO: 109 - DNA, 24 bp, Homo sapiens
tcctgtagaatactggcatctgtt

SEQ ID NO: 110 - DNA, 24 bp, Homo sapiens
cagacctcctgccaccgcagattc

SEQ ID NO: 111 - DNA, 24 bp, Homo sapiens
tgtctgacagctgtttgcagacct

SEQ ID NO: 112 - DNA, 24 bp, Homo sapiens
ctgtctgacagctgtttgcagacc

SEQ ID NO: 113 - DNA, 24 bp, Homo sapiens
tctgtctgacagctgtttgcagac

SEQ ID NO: 114 - DNA, 24 bp, Homo sapiens
ttctgtctgacagctgtttgcaga

SEQ ID NO: 115 - DNA, 24 bp, Homo sapiens
attcctattagatctgtcgcccta

SEQ ID NO: 116 - DNA, 24 bp, Homo sapiens
cattcctattagatctgtcgccct

SEQ ID NO: 117 - DNA, 24 bp, Homo sapiens
agcagactttttaagctttcttta

SEQ ID NO: 118 - DNA, 24 bp, Homo sapiens
gcagactttttaagctttctttag

SEQ ID NO: 119 - DNA, 24 bp, Homo sapiens
taagctttctttagaagaatattt

SEQ ID NO: 120 - DNA, 24 bp, Homo sapiens
aagctttctttagaagaatatttc

SEQ ID NO: 121 - DNA, 24 bp, Homo sapiens
agctttctttagaagaatatttca

SEQ ID NO: 122 - DNA, 24 bp, Homo sapiens
tttagaagaatatttcatgagaga

SEQ ID NO: 123 - DNA, 24 bp, Homo sapiens
gaagaatatttcatgagagattat

SEQ ID NO: 124 - DNA, 24 bp, Homo sapiens
tcagtataaccaaaaaatatacgc

SEQ ID NO: 125 - DNA, 24 bp, Homo sapiens
acataatccatctatttttcttga

SEQ ID NO: 126 - DNA, 24 bp, Homo sapiens
cataatccatctatttttcttgat

SEQ ID NO: 127 - DNA, 24 bp, Homo sapiens
tcttgatccatatgcttttacctg

SEQ ID NO: 128 - DNA, 24 bp, Homo sapiens
cttgatccatatgcttttacctgc

SEQ ID NO: 129 - DNA, 24 bp, Homo sapiens
ttgatccatatgcttttacctgca

SEQ ID NO: 130 - DNA, 24 bp, Homo sapiens
tcaacagatctgtcaaatcgcctg

SEQ ID NO: 131 - DNA, 24 bp, Homo sapiens
acctgcaggcgatttgacagatct

SEQ ID NO: 132 - DNA, 24 bp, Homo sapiens
cctgcaggcgatttgacagatctg

SEQ ID NO: 133 - DNA, 24 bp, Homo sapiens
acagatctgttgagaaatggcggc

SEQ ID NO: 134 - DNA, 24 bp, Homo sapiens
tatcataatgaaaacgccgccatt

SEQ ID NO: 135 - DNA, 24 bp, Homo sapiens
cattatgatataaagatatttaat

SEQ ID NO: 136 - DNA, 24 bp, Homo sapiens
tatttagcatgttcccaattctca

SEQ ID NO: 137 - DNA, 24 bp, Homo sapiens
gaaaaaacaaatcaaagacttacc

SEQ ID NO: 138 - DNA, 24 bp, Homo sapiens
atttgttttttcgaaattgtattt

SEQ ID NO: 139 - DNA, 24 bp, Homo sapiens
ttttttcgaaattgtatttatctt

SEQ ID NO: 140 - DNA, 24 bp, Homo sapiens
ttcgaaattgtatttatcttcagc

SEQ ID NO: 141 - DNA, 24 bp, Homo sapiens
tcgaaattgtatttatcttcagca

SEQ ID NO: 142 - DNA, 24 bp, Homo sapiens
cgaaattgtatttatcttcagcac

SEQ ID NO: 143 - DNA, 24 bp, Homo sapiens
gaaattgtatttatcttcagcaca

SEQ ID NO: 144 - DNA, 24 bp, Homo sapiens
agaagttaaagagtccagatgtgc

SEQ ID NO: 145 - DNA, 24 bp, Homo sapiens
tcttcagcacatctggactcttta

SEQ ID NO: 146 - DNA, 24 bp, Homo sapiens
catcacccttcagaacctgatctt

SEQ ID NO: 147 - DNA, 24 bp, Homo sapiens
acttcttaaagatcaggttctgaa

SEQ ID NO: 148 - DNA, 24 bp, Homo sapiens
gactgttgttgtcatcattatatt

SEQ ID NO: 149 - DNA, 24 bp, Homo sapiens
actgttgttgtcatcattatatta

SEQ ID NO: 150 - DNA, 24 bp, Homo sapiens
aactagaataaaaggaaaaataaa

SEQ ID NO: 151 - DNA, 24 bp, Homo sapiens
ctactatatatttatttttccttt

SEQ ID NO: 152 - DNA, 24 bp, Homo sapiens
tttttccttttattctagttgaaa

SEQ ID NO: 153 - DNA, 24 bp, Homo sapiens
tccttttattctagttgaaagaat

SEQ ID NO: 154 - DNA, 24 bp, Homo sapiens
ccttttattctagttgaaagaatt

SEQ ID NO: 155 - DNA, 24 bp, Homo sapiens
cttttattctagttgaaagaattc

SEQ ID NO: 156 - DNA, 24 bp, Homo sapiens
attctagttgaaagaattcagaat

SEQ ID NO: 157 - DNA, 24 bp, Homo sapiens
ttctagttgaaagaattcagaatc

SEQ ID NO: 158 - DNA, 24 bp, Homo sapiens
attcaactgttgcctccggttctg

SEQ ID NO: 159 - DNA, 24 bp, Homo sapiens
acatttcattcaactgttgcctcc

SEQ ID NO: 160 - DNA, 24 bp, Homo sapiens
cttttggattgcatctactgtata

SEQ ID NO: 161 - DNA, 24 bp, Homo sapiens
tgtgattttcttttggattgcatc

SEQ ID NO: 162 - DNA, 24 bp, Homo sapiens
atactaaccttggtttctgtgatt

SEQ ID NO: 163 - DNA, 24 bp, Homo sapiens
aaaaggtatctttgatactaacct

SEQ ID NO: 164 - DNA, 24 bp, Homo sapiens
aaaaaggtatctttgatactaacc

SEQ ID NO: 165 - DNA, 24 bp, Homo sapiens
ttttaaaaaggtatctttgatact

SEQ ID NO: 166 - DNA, 24 bp, Homo sapiens
attttaaaaaggtatctttgatac

SEQ ID NO: 167 - DNA, 24 bp, Homo sapiens
ttaatgcaaactgggacacaaaca

SEQ ID NO: 168 - DNA, 24 bp, Homo sapiens
taaattgccatgtttgtgtcccag

SEQ ID NO: 169 - DNA, 24 bp, Homo sapiens
aaattgccatgtttgtgtcccagt

SEQ ID NO: 170 - DNA, 24 bp, Homo sapiens
aattgccatgtttgtgtcccagtt

SEQ ID NO: 171 - DNA, 24 bp, Homo sapiens
tgtcccagtttgcattaacaaata

SEQ ID NO: 172 - DNA, 24 bp, Homo sapiens
caacatagttctcaaactatttgt

SEQ ID NO: 173 - DNA, 24 bp, Homo sapiens
ccaacatagttctcaaactatttg

SEQ ID NO: 174 - DNA, 24 bp, Homo sapiens
tccaacatagttctcaaactattt

SEQ ID NO: 175 - DNA, 24 bp, Homo sapiens
tttccaacatagttctcaaactat

SEQ ID NO: 176 - DNA, 24 bp, Homo sapiens
ttttccaacatagttctcaaacta

SEQ ID NO: 177 - DNA, 24 bp, Homo sapiens
tttttccaacatagttctcaaact

SEQ ID NO: 178 - DNA, 24 bp, Homo sapiens
cattaacaaatagtttgagaacta

SEQ ID NO: 179 - DNA, 24 bp, Homo sapiens
agaactatgttggaaaaaaaaata

SEQ ID NO: 180 - DNA, 24 bp, Homo sapiens
gttcttctagcctggagaaagaag

SEQ ID NO: 181 - DNA, 24 bp, Homo sapiens
attcttctttctccaggctagaag

SEQ ID NO: 182 - DNA, 24 bp, Homo sapiens
ttcttctttctccaggctagaaga

SEQ ID NO: 183 - DNA, 24 bp, Homo sapiens
tccaggctagaagaacaaaagaat

SEQ ID NO: 184 - DNA, 24 bp, Homo sapiens
aaattctgacaagatattcttttg

SEQ ID NO: 185 - DNA, 24 bp, Homo sapiens
cttttagttgctgctcttttccag

SEQ ID NO: 186 - DNA, 24 bp, Homo sapiens
agaaaataaaattaccttgacttg

SEQ ID NO: 187 - DNA, 24 bp, Homo sapiens
tgcaagcaggccctgggggatttg

SEQ ID NO: 188 - DNA, 24 bp, Homo sapiens
attttctcaaatcccccagggcct

SEQ ID NO: 189 - DNA, 24 bp, Homo sapiens
ttttctcaaatcccccagggcctg

SEQ ID NO: 190 - DNA, 24 bp, Homo sapiens
ctcaaatcccccagggcctgcttg

SEQ ID NO: 191 - DNA, 24 bp, Homo sapiens
tcaaatcccccagggcctgcttgc

SEQ ID NO: 192 - DNA, 24 bp, Homo sapiens
ttaattcaatcattggttttctgc

SEQ ID NO: 193 - DNA, 24 bp, Homo sapiens
taattcaatcattggttttctgcc

SEQ ID NO: 194 - DNA, 24 bp, Homo sapiens
aattcaatcattggttttctgccc

SEQ ID NO: 195 - DNA, 24 bp, Homo sapiens
attcaatcattggttttctgccca

SEQ ID NO: 196 - DNA, 24 bp, Homo sapiens
gcaaggaactatgaataacctaat

SEQ ID NO: 197 - DNA, 24 bp, Homo sapiens
ctgcccattaggttattcatagtt

SEQ ID NO: 198 - DNA, 24 bp, Homo sapiens
tgcccattaggttattcatagttc

SEQ ID NO: 199 - DNA, 24 bp, Homo sapiens
tagaaaacaatttaacaggaaata

SEQ ID NO: 200 - DNA, 24 bp, Homo sapiens
ctgttaaattgttttctataaacc

SEQ ID NO: 201 - DNA, 24 bp, Homo sapiens
gaaataaaaaagatgttactgtat

SEQ ID NO: 202 - DNA, 24 bp, Homo sapiens
agaaataaaaaagatgttactgta

SEQ ID NO: 203 - DNA, 24 bp, Homo sapiens
ctataaacccttatacagtaacat

SEQ ID NO: 204 - DNA, 24 bp, Homo sapiens
tataaacccttatacagtaacatc

SEQ ID NO: 205 - DNA, 24 bp, Homo sapiens
ttatttctaaaagtgttttggctg

SEQ ID NO: 206 - DNA, 24 bp, Homo sapiens
tatttctaaaagtgttttggctgg

SEQ ID NO: 207 - DNA, 24 bp, Homo sapiens
atttctaaaagtgttttggctggt

SEQ ID NO: 208 - DNA, 24 bp, Homo sapiens
tttctaaaagtgttttggctggtc

SEQ ID NO: 209 - DNA, 24 bp, Homo sapiens
taaaagtgttttggctggtctcac

SEQ ID NO: 210 - DNA, 24 bp, Homo sapiens
cataatacaaagtaaagtacaatt

SEQ ID NO: 211 - DNA, 24 bp, Homo sapiens
acataatacaaagtaaagtacaat

SEQ ID NO: 212 - DNA, 24 bp, Homo sapiens
ggctggtctcacaattgtacttta

SEQ ID NO: 213 - DNA, 24 bp, Homo sapiens
gctggtctcacaattgtactttac

SEQ ID NO: 214 - DNA, 24 bp, Homo sapiens
ctttgtattatgtaaaaggaatac

SEQ ID NO: 215 - DNA, 24 bp, Homo sapiens
tattatgtaaaaggaatacacaac

SEQ ID NO: 216 - DNA, 24 bp, Homo sapiens
ttcttacaggcaacaatgcaggat

SEQ ID NO: 217 - DNA, 24 bp, Homo sapiens
gaacagaggcgtccccagttggaa

SEQ ID NO: 218 - DNA, 24 bp, Homo sapiens
ggcagcggtaatgagttcttccaa

SEQ ID NO: 219 - DNA, 24 bp, Homo sapiens
tcaaattttgggcagcggtaatga

SEQ ID NO: 220 - DNA, 24 bp, Homo sapiens
aaaaacaagaccagcaatcaagag

SEQ ID NO: 221 - DNA, 24 bp, Homo sapiens
tgtgtcccatgcttgttaaaaaac

SEQ ID NO: 222 - DNA, 24 bp, Homo sapiens
ttaacaagcatgggacacacaaag

SEQ ID NO: 223 - DNA, 24 bp, Homo sapiens
taacaagcatgggacacacaaagc

SEQ ID NO: 224 - DNA, 24 bp, Homo sapiens
aacaagcatgggacacacaaagca

SEQ ID NO: 225 - DNA, 24 bp, Homo sapiens
acaagcatgggacacacaaagcaa

SEQ ID NO: 226 - DNA, 24 bp, Homo sapiens
ttgaaacttgtcatgcatcttgct

SEQ ID NO: 227 - DNA, 24 bp, Homo sapiens
attgaaacttgtcatgcatcttgc

SEQ ID NO: 228 - DNA, 24 bp, Homo sapiens
tattgaaacttgtcatgcatcttg

SEQ ID NO: 229 - DNA, 24 bp, Homo sapiens
aataaaaacttaagttcatatatc

SEQ ID NO: 230 - DNA, 24 bp, Homo sapiens
gtgaatatattattggatttctat

SEQ ID NO: 231 - DNA, 24 bp, Homo sapiens
aagataattcatgaacatcttaat

SEQ ID NO: 232 - DNA, 24 bp, Homo sapiens
acagaaaagcatacacattactta

SEQ ID NO: 233 - DNA, 24 bp, Homo sapiens
ctgttaaagaggaagttagaagat

SEQ ID NO: 234 - DNA, 24 bp, Homo sapiens
tgttaaagaggaagttagaagatc

SEQ ID NO: 235 - DNA, 24 bp, Homo sapiens
ccgccttccactcagagctcagat

SEQ ID NO: 236 - DNA, 24 bp, Homo sapiens
ccctcagctcttgaagtaaacggt

SEQ ID NO: 237 - DNA, 24 bp, Homo sapiens
cttcaagagctgagggcaaagcag

SEQ ID NO: 238 - DNA, 24 bp, Homo sapiens
aacaaatagctagagccaaagaga

SEQ ID NO: 239 - DNA, 24 bp, Homo sapiens
gaacaaatagctagagccaaagag

SEQ ID NO: 240 - DNA, 24 bp, Homo sapiens
gctctagctatttgttcaaaagtg

SEQ ID NO: 241 - DNA, 24 bp, Homo sapiens
ttcaaaagtgcaactatgaagtga

SEQ ID NO: 242 - DNA, 24 bp, Homo sapiens
tctctcacccagtcatcacttcat

SEQ ID NO: 243 - DNA, 24 bp, Homo sapiens
ctctctcacccagtcatcacttca

SEQ ID NO: 244 - DNA, 24 bp, Homo sapiens
tatatatatatatatttttctctt

SEQ ID NO: 245 - DNA, 24 bp, Homo sapiens
tctctttctatagacagctaattc

SEQ ID NO: 246 - DNA, 24 bp, Homo sapiens
ctctttctatagacagctaattca

SEQ ID NO: 247 - DNA, 24 bp, Homo sapiens
aaacagtaaaaaaatgaattagct

SEQ ID NO: 248 - DNA, 24 bp, Homo sapiens
tctttctatagacagctaattcat

SEQ ID NO: 249 - DNA, 24 bp, Homo sapiens
aaaacagtaaaaaaatgaattagc

SEQ ID NO: 250 - DNA, 24 bp, Homo sapiens
tatagacagctaattcattttttt

SEQ ID NO: 251 - DNA, 24 bp, Homo sapiens
tattctgtaatataaaaattttaa

SEQ ID NO: 252 - DNA, 24 bp, Homo sapiens
atattctgtaatataaaaatttta

SEQ ID NO: 253 - DNA, 24 bp, Homo sapiens
tttactgttttaaaatttttatat

SEQ ID NO: 254 - DNA, 24 bp, Homo sapiens
ttactgttttaaaatttttatatt

SEQ ID NO: 255 - DNA, 24 bp, Homo sapiens
tactgttttaaaatttttatatta

SEQ ID NO: 256 - DNA, 24 bp, Homo sapiens
actgttttaaaatttttatattac

SEQ ID NO: 257 - DNA, 24 bp, Homo sapiens
ctgttttaaaatttttatattaca

SEQ ID NO: 258 - DNA, 24 bp, Homo sapiens
aaaatttttatattacagaatata

SEQ ID NO: 259 - DNA, 24 bp, Homo sapiens
aaatttttatattacagaatataa

SEQ ID NO: 260 - DNA, 24 bp, Homo sapiens
ttgtagactatcttttatattctg

SEQ ID NO: 261 - DNA, 24 bp, Homo sapiens
tatattacagaatataaaagatag

SEQ ID NO: 262 - DNA, 24 bp, Homo sapiens
atattacagaatataaaagatagt

SEQ ID NO: 263 - DNA, 24 bp, Homo sapiens
tattacagaatataaaagatagtc

SEQ ID NO: 264 - DNA, 24 bp, Homo sapiens
caatgctgctgtcttcttgctatg

SEQ ID NO: 265 - DNA, 24 bp, Homo sapiens
caatgggaaaaagttaacaaaatg

SEQ ID NO: 266 - DNA, 24 bp, Homo sapiens
tgcaagtatcaagaaaaatatatg

SEQ ID NO: 267 - DNA, 24 bp, Homo sapiens
tcttgatacttgcagaaatgattt

SEQ ID NO: 268 - DNA, 24 bp, Homo sapiens
cttgatacttgcagaaatgatttg

SEQ ID NO: 269 - DNA, 24 bp, Homo sapiens
ttgatacttgcagaaatgatttgt

SEQ ID NO: 270 - DNA, 24 bp, Homo sapiens
ttttcagggaactgtagaatttat

SEQ ID NO: 271 - DNA, 24 bp, Homo sapiens
catggagggtactgaaataaattc

SEQ ID NO: 272 - DNA, 24 bp, Homo sapiens
ccatggagggtactgaaataaatt

SEQ ID NO: 273 - DNA, 24 bp, Homo sapiens
cagggaactgtagaatttatttca

SEQ ID NO: 274 - DNA, 24 bp, Homo sapiens
tccatggagggtactgaaataaat

SEQ ID NO: 275 - DNA, 24 bp, Homo sapiens
agggaactgtagaatttatttcag

SEQ ID NO: 276 - DNA, 24 bp, Homo sapiens
ttccatggagggtactgaaataaa

SEQ ID NO: 277 - DNA, 24 bp, Homo sapiens
cctgtcttttttccatggagggta

SEQ ID NO: 278 - DNA, 24 bp, Homo sapiens
ccctgtcttttttccatggagggt

SEQ ID NO: 279 - DNA, 24 bp, Homo sapiens
tccctgtcttttttccatggaggg

SEQ ID NO: 280 - DNA, 24 bp, Homo sapiens
tttcagtaccctccatggaaaaaa

SEQ ID NO: 281 - DNA, 24 bp, Homo sapiens
agtaccctccatggaaaaaagaca

SEQ ID NO: 282 - DNA, 24 bp, Homo sapiens
agtttgcatggttcttgctcaagg

SEQ ID NO: 283 - DNA, 24 bp, Homo sapiens
ataagaaaatgcattccttgagca

SEQ ID NO: 284 - DNA, 24 bp, Homo sapiens
cataagaaaatgcattccttgagc

SEQ ID NO: 285 - DNA, 24 bp, Homo sapiens
catggttcttgctcaaggaatgca

SEQ ID NO: 286 - DNA, 24 bp, Homo sapiens
acctacatgtggaaataaattttc

SEQ ID NO: 287 - DNA, 24 bp, Homo sapiens
gacctacatgtggaaataaatttt

SEQ ID NO: 288 - DNA, 24 bp, Homo sapiens
tgacctacatgtggaaataaattt

SEQ ID NO: 289 - DNA, 24 bp, Homo sapiens
cttatgaaaatttatttccacatg

SEQ ID NO: 290 - DNA, 24 bp, Homo sapiens
ttatgaaaatttatttccacatgt

SEQ ID NO: 291 - DNA, 24 bp, Homo sapiens
attacatttttgacctacatgtgg

SEQ ID NO: 292 - DNA, 24 bp, Homo sapiens
cattacatttttgacctacatgtg

SEQ ID NO: 293 - DNA, 24 bp, Homo sapiens
tcattacatttttgacctacatgt

SEQ ID NO: 294 - DNA, 24 bp, Homo sapiens
tttccacatgtaggtcaaaaatgt

SEQ ID NO: 295 - DNA, 24 bp, Homo sapiens
cacatgtaggtcaaaaatgtaatg

SEQ ID NO: 296 - DNA, 24 bp, Homo sapiens
ttgcaatccagccatgatattttt

SEQ ID NO: 297 - DNA, 24 bp, Homo sapiens
actgttggtttgttgcaatccagc

SEQ ID NO: 298 - DNA, 24 bp, Homo sapiens
cactgttggtttgttgcaatccag

SEQ ID NO: 299 - DNA, 24 bp, Homo sapiens
aatgctctcatccatagtcatagg

SEQ ID NO: 300 - DNA, 24 bp, Homo sapiens
atgtctcagtaatcttcttaccta

SEQ ID NO: 301 - DNA, 24 bp, Homo sapiens
caagttatttaatgtctcagtaat

SEQ ID NO: 302 - DNA, 24 bp, Homo sapiens
acaagttatttaatgtctcagtaa

SEQ ID NO: 303 - DNA, 24 bp, Homo sapiens
gactctgatgacatatttttcccc

SEQ ID NO: 304 - DNA, 24 bp, Homo sapiens
tccccagtatggttccagatcatg

SEQ ID NO: 305 - DNA, 24 bp, Homo sapiens
ccccagtatggttccagatcatgt

SEQ ID NO: 306 - DNA, 24 bp, Homo sapiens
cccagtatggttccagatcatgtc

SEQ ID NO: 307 - DNA, 24 bp, Homo sapiens
tatttgtctttgtgtatgtgtgta

SEQ ID NO: 308 - DNA, 24 bp, Homo sapiens
tctttgtgtatgtgtgtatgtgta

SEQ ID NO: 309 - DNA, 24 bp, Homo sapiens
tgtatgtgtgtatgtgtatgtgtt

SEQ ID NO: 310 - DNA, 24 bp, Homo sapiens
aggccagacctatttgactggaat

SEQ ID NO: 311 - DNA, 24 bp, Homo sapiens
ggccagacctatttgactggaata

SEQ ID NO: 312 - DNA, 24 bp, Homo sapiens
actggaatagtgtggtttgccagc

SEQ ID NO: 313 - DNA, 24 bp, Homo sapiens
ccagcagtcagccacacaacgact

SEQ ID NO: 314 - DNA, 24 bp, Homo sapiens
tctatgcctaattgatatctggcg

SEQ ID NO: 315 - DNA, 24 bp, Homo sapiens
ccaaccttcaggatcgagtagttt

SEQ ID NO: 316 - DNA, 24 bp, Homo sapiens
tggactaccactgcttttagtatg

SEQ ID NO: 317 - DNA, 24 bp, Homo sapiens
agtatggtagagtttaatgttttc

SEQ ID NO: 318 - DNA, 24 bp, Homo sapiens
gtatggtagagtttaatgttttca

SEQ ID NO: 319 - DNA, 24 bp, Homo sapiens
agactctaaaaggataatgaacaa

SEQ ID NO: 320 - DNA, 24 bp, Homo sapiens
actttgatttgttcattatccttt

SEQ ID NO: 321 - DNA, 24 bp, Homo sapiens
tatatttgagactctaaaaggata

SEQ ID NO: 322 - DNA, 24 bp, Homo sapiens
atttgttcattatccttttagagt

SEQ ID NO: 323 - DNA, 24 bp, Homo sapiens
gtttctatatttgagactctaaaa

SEQ ID NO: 324 - DNA, 24 bp, Homo sapiens
ggtttctatatttgagactctaaa

SEQ ID NO: 325 - DNA, 24 bp, Homo sapiens
tggtttctatatttgagactctaa

SEQ ID NO: 326 - DNA, 24 bp, Homo sapiens
ttcattatccttttagagtctcaa

SEQ ID NO: 327 - DNA, 24 bp, Homo sapiens
agagtctcaaatatagaaaccaaa

SEQ ID NO: 328 - DNA, 24 bp, Homo sapiens
gagtctcaaatatagaaaccaaaa

SEQ ID NO: 329 - DNA, 24 bp, Homo sapiens
cacttcctggatggcttcaatgct

SEQ ID NO: 330 - DNA, 24 bp, Homo sapiens
gcctcaacaagtgagcattgaagc

SEQ ID NO: 331 - DNA, 24 bp, Homo sapiens
cctcaacaagtgagcattgaagcc

SEQ ID NO: 332 - DNA, 24 bp, Homo sapiens
ggtggccttggcaacatttccact

SEQ ID NO: 333 - DNA, 24 bp, Homo sapiens
gtcactttaggtggccttggcaac

SEQ ID NO: 334 - DNA, 24 bp, Homo sapiens
atgatgtaactgaaaatgttcttc

SEQ ID NO: 335 - DNA, 24 bp, Homo sapiens
cctgttgagaatagtgcatttgat

SEQ ID NO: 336 - DNA, 24 bp, Homo sapiens
cagttacatcatcaaatgcactat

SEQ ID NO: 337 - DNA, 24 bp, Homo sapiens
agttacatcatcaaatgcactatt

SEQ ID NO: 338 - DNA, 24 bp, Homo sapiens
cacactttacctgttgagaatagt

SEQ ID NO: 339 - DNA, 24 bp, Homo sapiens
ctgttttatatgcatttttaggta

SEQ ID NO: 340 - DNA, 24 bp, Homo sapiens
tgttttatatgcatttttaggtat

SEQ ID NO: 341 - DNA, 24 bp, Homo sapiens
atatgcatttttaggtattacgtg

SEQ ID NO: 342 - DNA, 24 bp, Homo sapiens
tatgcatttttaggtattacgtgc

SEQ ID NO: 343 - DNA, 24 bp, Homo sapiens
taggtattacgtgcacatatatat

SEQ ID NO: 344 - DNA, 24 bp, Homo sapiens
aggtattacgtgcacatatatata

SEQ ID NO: 345 - DNA, 24 bp, Homo sapiens
ggtattacgtgcacatatatatat

SEQ ID NO: 346 - DNA, 24 bp, Homo sapiens
agcaacaactataatattgtgcag

SEQ ID NO: 347 - DNA, 24 bp, Homo sapiens
gttcctccatctttctctttttat

SEQ ID NO: 348 - DNA, 24 bp, Homo sapiens
tctttttatggagttcactaggtg

SEQ ID NO: 349 - DNA, 24 bp, Homo sapiens
tatggagttcactaggtgcaccat

SEQ ID NO: 350 - DNA, 24 bp, Homo sapiens
atggagttcactaggtgcaccatt

SEQ ID NO: 351 - DNA, 24 bp, Homo sapiens
tggagttcactaggtgcaccattc

SEQ ID NO: 352 - DNA, 24 bp, Homo sapiens
ataattgcatctgaacatttggtc

SEQ ID NO: 353 - DNA, 24 bp, Homo sapiens
gtcctttgcagggtgagtgagcga

SEQ ID NO: 354 - DNA, 24 bp, Homo sapiens
ttccaaagcagcctctcgctcact

SEQ ID NO: 355 - DNA, 24 bp, Homo sapiens
cagggtgagtgagcgagaggctgc

SEQ ID NO: 356 - DNA, 24 bp, Homo sapiens
gaagaaactcatagattactgcaa

SEQ ID NO: 357 - DNA, 24 bp, Homo sapiens
caggtccagggggaactgttgcag

SEQ ID NO: 358 - DNA, 24 bp, Homo sapiens
ccaggtccagggggaactgttgca

SEQ ID NO: 359 - DNA, 24 bp, Homo sapiens
agcttctgtaagccaggcaagaaa

SEQ ID NO: 360 - DNA, 24 bp, Homo sapiens
ttgcctggcttacagaagctgaaa

SEQ ID NO: 361 - DNA, 24 bp, Homo sapiens
cttacgggtagcatcctgtaggac

SEQ ID NO: 362 - DNA, 24 bp, Homo sapiens
ctcccttggagtcttctaggagcc

SEQ ID NO: 363 - DNA, 24 bp, Homo sapiens
actcccttggagtcttctaggagc

SEQ ID NO: 364 - DNA, 24 bp, Homo sapiens
atcagctcttttactcccttggag

SEQ ID NO: 365 - DNA, 24 bp, Homo sapiens
cgctttagcactcttgtggatcca

SEQ ID NO: 366 - DNA, 24 bp, Homo sapiens
gcactcttgtggatccaattgaac

SEQ ID NO: 367 - DNA, 24 bp, Homo sapiens
tccctggcttgtcagttacaagta

SEQ ID NO: 368 - DNA, 24 bp, Homo sapiens
gtccctggcttgtcagttacaagt

SEQ ID NO: 369 - DNA, 24 bp, Homo sapiens
ttttgtccctggcttgtcagttac

SEQ ID NO: 370 - DNA, 24 bp, Homo sapiens
gttttgtccctggcttgtcagtta

SEQ ID NO: 371 - DNA, 24 bp, Homo sapiens
tacttgtaactgacaagccaggga

SEQ ID NO: 372 - DNA, 24 bp, Homo sapiens
gctcctactcagactgttactctg

SEQ ID NO: 373 - DNA, 24 bp, Homo sapiens
taccatgtattgctaaacaaagta

SEQ ID NO: 374 - DNA, 24 bp, Homo sapiens
attgaagagtaacaatttgagcca

SEQ ID NO: 375 - DNA, 24 bp, Mus sp.
aggctctgcaaagttctttgaaag

SEQ ID NO: 376 - DNA, 24 bp, Mus sp.
aaagagcaacaaaatggcttcaac

SEQ ID NO: 377 - DNA, 24 bp, Mus sp.
aaagagcaataaaatggcttcaac

SEQ ID NO: 378 - DNA, 24 bp, Mus sp.
aaagaactttgcagagcctcaaaa

SEQ ID NO: 379 - DNA, 24 bp, Mus sp.
ctgaatatctatgcattaataact

SEQ ID NO: 380 - DNA, 24 bp, Mus sp.
tattatattacagggcatattata

SEQ ID NO: 381 - DNA, 24 bp, Mus sp.
aggtaagccgaggtttggccttta

SEQ ID NO: 382 - DNA, 24 bp, Mus sp.
cccagagtccttcaaagatattga

SEQ ID NO: 383 - protein, 3685 aa, Homo sapiens
MLWWEEVEDCYEREDVQKKTFTKWVNAQFSKFGKQHIENLFSDLQDGRRLLDLLEGLTGQKLPKEKGSTRVHALNNVNKALRVLQNNNVDLVNIGSTDIVDGNHKLTLGLIWNIILHWQVKNVMKNIMAGLQQTNSEKILLSWVRQSTRNYPQVNVINFTTSWSDGLALNALIHSHRPDLFDWNSVVCQQSATQRLEHAFNIARYQLGIEKLLDPEDVDTTYPDKKSILMYITSLFQVLPQQVSIEAIQEVEMLPRPPKVTKEEHFQLHHQMHYSQQITVSLAQGYERTSSPKPRFKSYAYTQAAYVTTSDPTRSPFPSQHLEAPEDKSFGSSLMESEVNLDRYQTALEEVLSWLLSAEDTLQAQGEISNDVEVVKDQFHTHEGYMMDLTAHQGRVGNILQLGSKLIGTGKLSEDEETEVQEQMNLLNSRWECLRVASMEKQSNLHRVLMDLQNQKLKELNDWLTKTEERTRKMEEEPLGPDLEDLKRQVQQHKVLQEDLEQEQVRVNSLTHMVVVVDESSGDHATAALEEQLKVLGDRWANICRWTEDRWVLLQDILLKWQRLTEEQCLFSAWLSEKEDAVNKIHTTGFKDQNEMLSSLQKLAVLKADLEKKKQSMGKLYSLKQDLLSTLKNKSVTQKTEAWLDNFARCWDNLVQKLEKSTAQISQAVTTTQPSLTQTTVMETVTTVTTREQILVKHAQEELPPPPPQKKRQITVDSEIRKRLDVDITELHSWITRSEAVLQSPEFAIFRKEGNFSDLKEKVNAIEREKAEKFRKLQDASRSAQALVEQMVNEGVNADSIKQASEQLNSRWIEFCQLLSERLNWLEYQNNIIAFYNQLQQLEQMTTTAENWLKIQPTTPSEPTAIKSQLKICKDEVNRLSGLQPQIERLKIQSIALKEKGQGPMFLDADFVAFTNHFKQVFSDVQAREKELQTIFDTLPPMRYQETMSAIRTWVQQSETKLSIPQLSVTDYEIMEQRLGELQALQSSLQEQQSGLYYLSTTVKEMSKKAPSEISRKYQSEFEEIEGRWKKLSSQLVEHCQKLEEQMNKLRKIQNHIQTLKKWMAEVDVFLKEEWPALGDSEILKKQLKQCRLLVSDIQTIQPSLNSVNEGGQKIKNEAEPEFASRLETELKELNTQWDHMCQQVYARKEALKGGLEKTVSLQKDLSEMHEWMTQAEEEYLERDFEYKTPDELQKAVEEMKRAKEEAQQKEAKVKLLTESVNSVIAQAPPVAQEALKKELETLTTNYQWLCTRLNGKCKTLEEVWACWHELLSYLEKANKWLNEVEFKLKTTENIPGGAEEISEVLDSLENLMRHSEDNPNQIRILAQTLTDGGVMDELINEELETFNSRWRELHEEAVRRQKLLEQSIQSAQETEKSLHLIQESLTFIDKQLAAYIADKVDAAQMPQEAQKIQSDLTSHEISLEEMKKHNQGKEAAQRVLSQIDVAQKKLQDVSMKFRLFQKPANFELRLQESKMILDEVKMHLPALETKSVEQEVVQSQLNHCVNLYKSLSEVKSEVEMVIKTGRQIVQKKQTENPKELDERVTALKLHYNELGAKVTERKQQLEKCLKLSRKMRKEMNVLTEWLAATDMELTKRSAVEGMPSNLDSEVAWGKATQKEIEKQKVHLKSITEVGEALKTVLGKKETLVEDKLSLLNSNWIAVTSRAEEWLNLLLEYQKHMETFDQNVDHITKWIIQADTLLDESEKKKPQQKEDVLKRLKAELNDIRPKVDSTRDQAANLMANRGDHCRKLVEPQISELNHRFAAISHRIKTGKASIPLKELEQFNSDIQKLLEPLEAEIQQGVNLKEEDFNKDMNEDNEGTVKELLQRGDNLQQRITDERKREEIKIKQQLLQTKHNALKDLRSQRRKKALEISHQWYQYKRQADDLLKCLDDIEKKLASLPEPRDERKIKEIDRELQKKKEELNAVRRQAEGLSEDGAAMAVEPTQIQLSKRWREIESKFAQFRRLNFAQIHTVREETMMVMTEDMPLEISYVPSTYLTEITHVSQALLEVEQLLNAPDLCAKDFEDLFKQEESLKNIKDSLQQSSGRIDIIHSKKTAALQSATPVERVKLQEALSQLDFQWEKVNKMYKDRQGRFDRSVEKWRRFHYDIKIFNQWLTEAEQFLRKTQIPENWEHAKYKWYLKELQDGIGQRQTVVRTLNATGEEIIQQSSKTDASILQEKLGSLNLRWQEVCKQLSDRKKRLEEQKNILSEFQRDLNEFVLWLEEADNIASIPLEPGKEQQLKEKLEQVKLLVEELPLRQGILKQLNETGGPVLVSAPISPEEQDKLENKLKQTNLQWIKVSRALPEKQGEIEAQIKDLGQLEKKLEDLEEQLNHLLLWLSPIRNQLEIYNQPNQEGPFDVQETEIAVQAKQPDVEEILSKGQHLYKEKPATQPVKRKLEDLSSEWKAVNRLLQELRAKQPDLAPGLTTIGASPTQTVTLVTQPVVTKETAISKLEMPSSLMLEVPALADFNRAWTELTDWLSLLDQVIKSQRVMVGDLEDINEMIIKQKATMQDLEQRRPQLEELITAAQNLKNKTSNQEARTIITDRIERIQNQWDEVQEHLQNRRQQLNEMLKDSTQWLEAKEEAEQVLGQARAKLESWKEGPYTVDAIQKKITETKQLAKDLRQWQTNVDVANDLALKLLRDYSADDTRKVHMITENINASWRSIHKRVSEREAALEETHRLLQQFPLDLEKFLAWLTEAETTANVLQDATRKERLLEDSKGVKELMKQWQDLQGEIEAHTDVYHNLDENSQKILRSLEGSDDAVLLQRRLDNMNFKWSELRKKSLNIRSHLEASSDQWKRLHLSLQELLVWLQLKDDELSRQAPIGGDFPAVQKQNDVHRAFKRELKTKEPVIMSTLETVRIFLTEQPLEGLEKLYQEPRELPPEERAQNVTRLLRKQAEEVNTEWEKLNLHSADWQRKIDETLERLQELQEATDELDLKLRQAEVIKGSWQPVGDLLIDSLQDHLEKVKALRGEIAPLKENVSHVNDLARQLTTLGIQLSPYNLSTLEDLNTRWKLLQVAVEDRVRQLHEAHRDFGPASQHFLSTSVQGPWERAISPNKVPYYINHETQTTCWDHPKMTELYQSLADLNNVRFSAYRTAMKLRRLQKALCLDLLSLSAACDALDQHNLKQNDQPMDILQIINCLTTIYDRLEQEHNNLVNVPLCVDMCLNWLLNVYDTGRTGRIRVLSFKTGIISLCKAHLEDKYRYLFKQVASSTGFCDQRRLGLLLHDSIQIPRQLGEVASFGGSNIEPSVRSCFQFANNKPEIEAALFLDWMRLEPQSMVWLPVLHRVAAAETAKHQAKCNICKECPIIGFRYRSLKHFNYDICQSCFFSGRVAKGHKMHYPMVEYCTPTTSGEDVRDFAKVLKNKFRTKRYFAKHPRMGYLPVQTVLEGDNMETPVTLINFWPVDSAPASSPQLSHDDTHSRIEHYASRLAEMENSNGSYLNDSISPNESIDDEHLLIQHYCQSLNQDSPLSQPRSPAQILISLESEERGELERILADLEEENRNLQAEYDRLKQQHEHKGLSPLPSPPEMMPTSPQSPRDAELIAEAKLLRQHKGRLEARMQILEDHNKQLESQLHRLRQLLEQPQAEAKVNGTTVSSPSTSLQRSDSSQPMLLRVVGSQTSDSMGEEDLLSPPQDTSTGLEEVMEQLNNSFPSSRGRNTPGKPMREDTM

SEQ ID NO: 384 - DNA, 14069 bp, Homo sapiens
cgttaaatgcaaacgctgctctggctcatgtgtttgctccgaggtataggttttgttcgactgacgtatcagatagtcagagtggttaccacaccgacgttgtagcagctgcataataaatgactgaaagaatcatgttaggcatgcccacctaacctaacttgaatcatgcgaaaggggagctgttggaattcaaatagactttctggttcccagcagtcggcagtaatagaatgctttcaggaagatgacagaatcaggagaaagatgctgttttgcactatcttgatttgttacagcagccaacttattggcatgatggagtgacaggaaaaacagctggcatggaagatgaaagagaagatgttcaaaagaaaacattcacaaaatgggtaaatgcacaattttctaagtttgggaagcagcatattgagaacctcttcagtgacctacaggatgggaggcgcctcctagacctcctcgaaggcctgacagggcaaaaactgccaaaagaaaaaggatccacaagagttcatgccctgaacaatgtcaacaaggcactgcgggttttgcagaacaataatgttgatttagtgaatattggaagtactgacatcgtagatggaaatcataaactgactcttggtttgatttggaatataatcctccactggcaggtcaaaaatgtaatgaaaaatatcatggctggattgcaacaaaccaacagtgaaaagattctcctgagctgggtccgacaatcaactcgtaattatccacaggttaatgtaatcaacttcaccaccagctggtctgatggcctggctttgaatgctctcatccatagtcataggccagacctatttgactggaatagtgtggtttgccagcagtcagccacacaacgactggaacatgcattcaacatcgccagatatcaattaggcatagagaaactactcgatcctgaagatgttgataccacctatccagataagaagtccatcttaatgtacatcacatcactcttccaagttttgcctcaacaagtgagcattgaagccatccaggaagtggaaatgttgccaaggccacctaaagtgactaaagaagaacattttcagttacatcatcaaatgcactattctcaacagatcacggtcagtctagcacagggatatgagagaacttcttcccctaagcctcgattcaagagctatgcctacacacaggctgcttatgtcaccacctctgaccctacacggagcccatttccttcacagcatttggaagctcctgaagacaagtcatttggcagttcattgatggagagtgaagtaaacctggaccgttatcaaacagctttagaagaagtattatcgtggcttctttctgctgaggacacattgcaagcacaaggagagatttctaatgatgtggaagtggtgaaagaccagtttcatactcatgaggggtacatgatggatttgacagcccatcagggccgggttggtaatattctacaattgggaagtaagctgattggaacaggaaaattatcagaagatgaagaaactgaagtacaagagcagatgaatctcctaaattcaagatgggaatgcctcagggtagctagcatggaaaaacaaagcaatttacatagagttttaatggatctccagaatcagaaactgaaagagttgaatgactggctaacaaaaacagaagaaagaacaaggaaaatggaggaagagcctcttggacctgatcttgaagacctaaaacgccaagtacaacaacataaggtgcttcaagaagatctagaacaagaacaagtcagggtcaattctctcactcacatggtggtggtagttgatgaatctagtggagatcacgcaactgctgctttggaagaacaacttaaggtattgggagatcgatgggcaaacatctgtagatggacagaagaccgctgggttcttttacaagacatccttctcaaatggcaacgtcttactgaagaacagtgcctttttagtgcatggctttcagaaaaagaagatgcagtgaacaagattcacacaactggctttaaagatcaaaatgaaatgttatcaagtcttcaaaaactggccgttttaaaagcggatctagaaaagaaaaagcaatccatgggcaaactgtattcactcaaacaagatcttctttcaacactgaagaataagtcagtgacccagaagacggaagcatggctggataactttgcccggtgttgggataatttagtccaaaaacttgaaaagagtacagcacagatttcacaggctgtcaccaccactcagccatcactaacacagacaactgtaatggaaacagtaactacggtgaccacaagggaacagatcctggtaaagcatgctcaagaggaacttccaccaccacctccccaaaagaagaggcagattactgtggattctgaaattaggaaaaggttggatgttgatataactgaacttcacagctggattactcgctcagaagctgtgttgcagagtcctgaatttgcaatctttcggaaggaaggcaacttctcagacttaaaagaaaaagtcaatgccatagagcgagaaaaagctgagaagttcagaaaactgcaagatgccagcagatcagctcaggccctggtggaacagatggtgaatgagggtgttaatgcagatagcatcaaacaagcctcagaacaactgaacagccggtggatcgaattctgccagttgctaagtgagagacttaactggctggagtatcagaacaacatcatcgctttctataatcagctacaacaattggagcagatgacaactactgctgaaaactggttgaaaatccaacccaccaccccatcagagccaacagcaattaaaagtcagttaaaaatttgtaaggatgaagtcaaccggctatcaggtcttcaacctcaaattgaacgattaaaaattcaaagcatagccctgaaagagaaaggacaaggacccatgttcctggatgcagactttgtggcctttacaaatcattttaagcaagtcttttctgatgtgcaggccagagagaaagagctacagacaatttttgacactttgccaccaatgcgctatcaggagaccatgagtgccatcaggacatgggtccagcagtcagaaaccaaactctccatacctcaacttagtgtcaccgactatgaaatcatggagcagagactcggggaattgcaggctttacaaagttctctgcaagagcaacaaagtggcctatactatctcagcaccactgtgaaagagatgtcgaagaaagcgccctctgaaattagccggaaatatcaatcagaatttgaagaaattgagggacgctggaagaagctctcctcccagctggttgagcattgtcaaaagctagaggagcaaatgaataaactccgaaaaattcagaatcacatacaaaccctgaagaaatggatggctgaagttgatgtttttctgaaggaggaatggcctgcccttggggattcagaaattctaaaaaagcagctgaaacagtgcagacttttagtcagtgatattcagacaattcagcccagtctaaacagtgtcaatgaaggtgggcagaagataaagaatgaagcagagccagagtttgcttcgagacttgagacagaactcaaagaacttaacactcagtgggatcacatgtgccaacaggtctatgccagaaaggaggccttgaagggaggtttggagaaaactgtaagcctccagaaagatctatcagagatgcacgaatggatgacacaagctgaagaagagtatcttgagagagattttgaatataaaactccagatgaattacagaaagcagttgaagagatgaagagagctaaagaagaggcccaacaaaaagaagcgaaagtgaaactccttactgagtctgtaaatagtgtcatagctcaagctccacctgtagcacaagaggccttaaaaaaggaacttgaaactctaaccaccaactaccagtggctctgcactaggctgaatgggaaatgcaagactttggaagaagtttgggcatgttggcatgagttattgtcatacttggagaaagcaaacaagtggctaaatgaagtagaatttaaacttaaaaccactgaaaacattcctggcggagctgaggaaatctctgaggtgctagattcacttgaaaatttgatgcgacattcagaggataacccaaatcagattcgcatattggcacagaccctaacagatggcggagtcatggatgagctaatcaatgaggaacttgagacatttaattctcgttggagggaactacatgaagaggctgtaaggaggcaaaagttgcttgaacagagcatccagtctgcccaggagactgaaaaatccttacacttaatccaggagtccctcacattcattgacaagcagttggcagcttatattgcagacaaggtggacgcagctcaaatgcctcaggaagcccagaaaatccaatctgatttgacaagtcatgagatcagtttagaagaaatgaagaaacataatcaggggaaggaggctgcccaaagagtcctgtctcagattgatgttgcacagaaaaaattacaagatgtctccatgaagtttcgattattccagaaaccagccaattttgagcagcgtctacaagaaagtaagatgattttagatgaagtgaagatgcacttgcctgcattggaaacaaagagtgtggaacaggaagtagtacagtcacagctaaatcattgtgtgaacttgtataaaagtctgagtgaagtgaagtctgaagtggaaatggtgataaagactggacgtcagattgtacagaaaaagcagacggaaaatcccaaagaacttgatgaaagagtaacagctttgaaattgcattataatgagctgggagcaaaggtaacagaaagaaagcaacagttggagaaatgcttgaaattgtcccgtaagatgcgaaaggaaatgaatgtcttgacagaatggctggcagctacagatatggaattgacaaagagatcagcagttgaaggaatgcctagtaatttggattctgaagttgcctggggaaaggctactcaaaaagagattgagaaacagaaggtgcacctgaagagtatcacagaggtaggagaggccttgaaaacagttttgggcaagaaggagacgttggtggaagataaactcagtcttctgaatagtaactggatagctgtcacctcccgagcagaagagtggttaaatcttttgttggaataccagaaacacatggaaacttttgaccagaatgtggaccacatcacaaagtggatcattcaggctgacacacttttggatgaatcagagaaaaagaaaccccagcaaaaagaagacgtgcttaagcgtttaaaggcagaactgaatgacatacgcccaaaggtggactctacacgtgaccaagcagcaaacttgatggcaaaccgcggtgaccactgcaggaaattagtagagccccaaatctcagagctcaaccatcgatttgcagccatttcacacagaattaagactggaaaggcctccattcctttgaaggaattggagcagtttaactcagatatacaaaaattgcttgaaccactggaggctgaaattcagcagggggtgaatctgaaagaggaagacttcaataaagatatgaatgaagacaatgagggtactgtaaaagaattgttgcaaagaggagacaacttacaacaaagaatcacagatgagagaaagcgagaggaaataaagataaaacagcagctgttacagacaaaacataatgctctcaaggatttgaggtctcaaagaagaaaaaaggctctagaaatttctcatcagtggtatcagtacaagaggcaggctgatgatctcctgaaatgcttggatgacattgaaaaaaaattagccagcctacctgagcccagagatgaaaggaaaataaaggaaattgatcgggaattgcagaagaagaaagaggagctgaatgcagtgcgtaggcaagctgagggcttgtctgaggatggggccgcaatggcagtggagccaactcagatccagctcagcaagcgctggcgggaaattgagagcaaatttgctcagtttcgaagactcaactttgcacaaattcacactgtccgtgaagaaacgatgatggtgatgactgaagacatgcctttggaaatttcttatgtgccttctacttatttgactgaaatcactcatgtctcacaagccctattagaagtggaacaacttctcaatgctcctgacctctgtgctaaggactttgaagatctctttaagcaagaggagtctctgaagaatataaaagatagtctacaacaaagctcaggtcggattgacattattcatagcaagaagacagcagcattgcaaagtgcaacgcctgtggaaagggtgaagctacaggaagctctctcccagcttgatttccaatgggaaaaagttaacaaaatgtacaaggaccgacaagggcgatttgacagatctgttgagaaatggcggcgttttcattatgatataaagatatttaatcagtggctaacagaagctgaacagtttctcagaaagacacaaattcctgagaattgggaacatgctaaatacaaatggtatcttaaggaactccaggatggcattgggcagcggcaaactgttgtcagaacattgaatgcaactggggaagaaataattcagcaatcctcaaaaacagatgccagtattctacaggaaaaattgggaagcctgaatctgcggtggcaggaggtctgcaaacagctgtcagacagaaaaaagaggctagaagaacaaaagaatatcttgtcagaatttcaaagagatttaaatgaatttgttttatggttggaggaagcagataacattgctagtatcccacttgaacctggaaaagagcagcaactaaaagaaaagcttgagcaagtcaagttactggtggaagagttgcccctgcgccagggaattctcaaacaattaaatgaaactggaggacccgtgcttgtaagtgctcccataagcccagaagagcaagataaacttgaaaataagctcaagcagacaaatctccagtggataaaggtttccagagctttacctgagaaacaaggagaaattgaagctcaaataaaagaccttgggcagcttgaaaaaaagcttgaagaccttgaagagcagttaaatcatctgctgctgtggttatctcctattaggaatcagttggaaatttataaccaaccaaaccaagaaggaccatttgacgttcaggaaactgaaatagcagttcaagctaaacaaccggatgtggaagagattttgtctaaagggcagcatttgtacaaggaaaaaccagccactcagccagtgaagaggaagttagaagatctgagctctgagtggaaggcggtaaaccgtttacttcaagagctgagggcaaagcagcctgacctagctcctggactgaccactattggagcctctcctactcagactgttactctggtgacacaacctgtggttactaaggaaactgccatctccaaactagaaatgccatcttccttgatgttggaggtacctgctctggcagatttcaaccgggcttggacagaacttaccgactggctttctctgcttgatcaagttataaaatcacagagggtgatggtgggtgaccttgaggatatcaacgagatgatcatcaagcagaaggcaacaatgcaggatttggaacagaggcgtccccagttggaagaactcattaccgctgcccaaaatttgaaaaacaagaccagcaatcaagaggctagaacaatcattacggatcgaattgaaagaattcagaatcagtgggatgaagtacaagaacaccttcagaaccggaggcaacagttgaatgaaatgttaaaggattcaacacaatggctggaagctaaggaagaagctgagcaggtcttaggacaggccagagccaagcttgagtcatggaaggagggtccctatacagtagatgcaatccaaaagaaaatcacagaaaccaagcagttggccaaagacctccgccagtggcagacaaatgtagatgtggcaaatgacttggccctgaaacttctccgggattattctgcagatgataccagaaaagtccacatgataacagagaatatcaatgcctcttggagaagcattcataaaagggtgagtgagcgagaggctgctttggaagaaactcatagattactgcaacagttccccctggacctggaaaagtttcttgcctggcttacagaagctgaaacaactgccaatgtcctacaggatgctacccgtaaggaaaggctcctagaagactccaagggagtaaaagagctgatgaaacaatggcaagacctccaaggtgaaattgaagctcacacagatgtttatcacaacctggatgaaaacagccaaaaaatcctgagatccctggaaggttccgatgatgcagtcctgttacaaagacgtttggataacatgaacttcaagtggagtgaacttcggaaaaagtctctcaacattaggtcccatttggaagccagttctgaccagtggaagcgtctgcacctttctctgcaggaacttctggtgtggctacagctgaaagatgatgaattaagccggcaggcacctattggaggcgactttccagcagttcagaagcagaacgatgtacatagggccttcaagagggaattgaaaactaaagaacctgtaatcatgagtactcttgagactgtacgaatatttctgacagagcagcctttggaaggactagagaaactctaccaggagcccagagagctgcctcctgaggagagagcccagaatgtcactcggcttctacgaaagcaggctgaggaggtcaatactgagtgggaaaaattgaacctgcactccgctgactggcagagaaaaatagatgagacccttgaaagactccaggaacttcaagaggccacggatgagctggacctcaagctgcgccaagctgaggtgatcaagggatcctggcagcccgtgggcgatctcctcattgactctctccaagatcacctcgagaaagtcaaggcacttcgaggagaaattgcgcctctgaaagagaacgtgagccacgtcaatgaccttgctcgccagcttaccactttgggcattcagctctcaccgtataacctcagcactctggaagacctgaacaccagatggaagcttctgcaggtggccgtcgaggaccgagtcaggcagctgcatgaagcccacagggactttggtccagcatctcagcactttctttccacgtctgtccagggtccctgggagagagccatctcgccaaacaaagtgccctactatatcaaccacgagactcaaacaacttgctgggaccatcccaaaatgacagagctctaccagtctttagctgacctgaataatgtcagattctcagcttataggactgccatgaaactccgaagactgcagaaggccctttgcttggatctcttgagcctgtcagctgcatgtgatgccttggaccagcacaacctcaagcaaaatgaccagcccatggatatcctgcagattattaattgtttgaccactatttatgaccgcctggagcaagagcacaacaatttggtcaacgtccctctctgcgtggatatgtgtctgaactggctgctgaatgtttatgatacgggacgaacagggaggatccgtgtcctgtcttttaaaactggcatcatttccctgtgtaaagcacatttggaagacaagtacagataccttttcaagcaagtggcaagttcaacaggattttgtgaccagcgcaggctgggcctccttctgcatgattctatccaaattccaagacagttgggtgaagttgcatcctttgggggcagtaacattgagccaagtgtccggagctgcttccaatttgctaataataagccagagatcgaagcggccctcttcctagactggatgagactggaaccccagtccatggtgtggctgcccgtcctgcacagagtggctgctgcagaaactgccaagcatcaggccaaatgtaacatctgcaaagagtgtccaatcattggattcaggtacaggagtctaaagcactttaattatgacatctgccaaagctgctttttttctggtcgagttgcaaaaggccataaaatgcactatcccatggtggaatattgcactccgactacatcaggagaagatgttcgagactttgccaaggtactaaaaaacaaatttcgaaccaaaaggtattttgcgaagcatccccgaatgggctacctgccagtgcagactgtcttagagggggacaacatggaaactcccgttactctgatcaacttctggccagtagattctgcgcctgcctcgtcccctcagctttcacacgatgatactcattcacgcattgaacattatgctagcaggctagcagaaatggaaaacagcaatggatcttatctaaatgatagcatctctcctaatgagagcatagatgatgaacatttgttaatccagcattactgccaaagtttgaaccaggactcccccctgagccagcctcgtagtcctgcccagatcttgatttccttagagagtgaggaaagaggggagctagagagaatcctagcagatcttgaggaagaaaacaggaatctgcaagcagaatatgaccgtctaaagcagcagcacgaacataaaggcctgtccccactgccgtcccctcctgaaatgatgcccacctctccccagagtccccgggatgctgagctcattgctgaggccaagctactgcgtcaacacaaaggccgcctggaagccaggatgcaaatcctggaagaccacaataaacagctggagtcacagttacacaggctaaggcagctgctggagcaaccccaggcagaggccaaagtgaatggcacaacggtgtcctctccttctacctctctacagaggtccgacagcagtcagcctatgctgctccgagtggttggcagtcaaacttcggactccatgggtgaggaagatcttctcagtcctccccaggacacaagcacagggttagaggaggtgatggagcaactcaacaactccttccctagttcaagaggaagaaatacccctggaaagccaatgagagaggacacaatgtaggaagtcttttccacatggcagatgatttgggcagagcgatggagtccttagtatcagtcatgacagatgaagaaggagcagaataaatgttttacaactcctgattcccgcatggtttttataatattcatacaacaaagaggattagacagtaagagtttacaagaaataaatctatatttttgtgaagggtagtggtattatactgtagatttcagtagtttctaagtctgttattgttttgttaacaatggcaggttttacacgtctatgcaattgtacaaaaaagttataagaaaactacatgtaaaatcttgatagctaaataacttgccatttctttatatggaacgcattttgggttgtttaaaaatttataacagttataaagaaagattgtaaactaaagtgtgctttataaaaaaaagttgtttataaaaacccctaaaaacaaaacaaacacacacacacacacatacacacacacacacaaaactttgaggcagcgcattgttttgcatccttttggcgtgatatccatatgaaattcatggctttttctttttttgcatattaaagataagacttcctctaccaccacaccaaatgactactacacactgctcatttgagaactgtcagctgagtggggcaggcttgagttttcatttcatatatctatatgtctataagtatataaatactatagttatatagataaagagatacgaatttctatagactgactttttccattttttaaatgttcatgtcacatcctaatagaaagaaattacttctagtcagtcatccaggcttacctgcttggtctagaatggatttttcccggagccggaagccaggaggaaactacaccacactaaaacattgtctacagctccagatgtttctcattttaaacaactttccactgacaacgaaagtaaagtaaagtattggatttttttaaagggaacatgtgaatgaatacacaggacttattatatcagagtgagtaatcggttggttggttgattgattgattgattgatacattcagcttcctgctgctagcaatgccacgatttagatttaatgatgcttcagtggaaatcaatcagaaggtattctgaccttgtgaacatcagaaggtattttttaactcccaagcagtagcaggacgatgatagggctggagggctatggattcccagcccatccctgtgaaggagtaggccactctttaagtgaaggattggatgattgttcataatacataaagttctctgtaattacaactaaattattatgccctcttctcacagtcaaaaggaactgggtggtttggtttttgttgcttttttagatttattgtcccatgtgggatgagtttttaaatgccacaagacataatttaaaataaataaactttgggaaaaggtgtaaaacagtagccccatcacatttgtgatactgacaggtatcaacccagaagcccatgaactgtgtttccatcctttgcatttctctgcgagtagttccacacaggtttgtaagtaagtaagaaagaaggcaaattgattcaaatgttacaaaaaaacccttcttggtggattagacaggttaaatatataaacaaacaaacaaaaattgctcaaaaaagaggagaaaagctcaagaggaaaagctaaggactggtaggaaaaagctttactctttcatgccattttatttctttttgatttttaaatcattcattcaatagataccaccgtgtgacctataattttgcaaatctgttacctctgacatcaagtgtaattagcttttggagagtgggctgacatcaagtgtaattagcttttggagagtgggttttgtccattattaataattaattaattaacatcaaacacggcttctcatgctatttctacctcactttggttttggggtgttcctgataattgtgcacacctgagttcacagcttcaccacttgtccattgcgttattttctttttcctttataattctttctttttccttcataattttcaaaagaaaacccaaagctctaaggtaacaaattaccaaattacatgaagatttggtttttgtcttgcatttttttcctttatgtgacgctggaccttttctttacccaaggatttttaaaactcagatttaaaacaaggggttactttacatcctactaagaagtttaagtaagtaagtttcattctaaaatcagaggtaaatagagtgcataaataattttgttttaatctttttgtttttcttttagacacattagctctggagtgagtctgtcataatatttgaacaaaaattgagagctttattgctgcattttaagcataattaatttggacattatttcgtgttgtgttctttataaccaccaagtattaaactgtaaatcataatgtaactgaagcataaacatcacatggcatgttttgtcattgttttcaggtactgagttcttacttgagtatcataatatattgtgttttaacaccaacactgtaacatttacgaattatttttttaaacttcagttttactgcattttcacaacatatcagacttcaccaaatatatgccttactattgtattatagtactgctttactgtgtatctcaataaagcacgcagttatgttac

SEQ ID NO: 385 - protein, 3677 aa, Homo sapiens
MEDEREDVQKKTFTKWVNAQFSKFGKQHIENLFSDLQDGRRLLDLLEGLTGQKLPKEKGSTRVHALNNVNKALRVLQNNNVDLVNIGSTDIVDGNHKLTLGLIWNIILHWQVKNVMKNIMAGLQQTNSEKILLSWVRQSTRNYPQVNVINFTTSWSDGLALNALIHSHRPDLFDWNSVVCQQSATQRLEHAFNIARYQLGIEKLLDPEDVDTTYPDKKSILMYITSLFQVLPQQVSIEAIQEVEMLPRPPKVTKEEHFQLHHQMHYSQQITVSLAQGYERTSSPKPRFKSYAYTQAAYVTTSDPTRSPFPSQHLEAPEDKSFGSSLMESEVNLDRYQTALEEVLSWLLSAEDTLQAQGEISNDVEVVKDQFHTHEGYMMDLTAHQGRVGNILQLGSKLIGTGKLSEDEETEVQEQMNLLNSRWECLRVASMEKQSNLHRVLMDLQNQKLKELNDWLTKTEERTRKMEEEPLGPDLEDLKRQVQQHKVLQEDLEQEQVRVNSLTHMVVVVDESSGDHATAALEEQLKVLGDRWANICRWTEDRWVLLQDILLKWQRLTEEQCLFSAWLSEKEDAVNKIHTTGFKDQNEMLSSLQKLAVLKADLEKKKQSMGKLYSLKQDLLSTLKNKSVTQKTEAWLDNFARCWDNLVQKLEKSTAQISQAVTTTQPSLTQTTVMETVTTVTTREQILVKHAQEELPPPPPQKKRQITVDSEIRKRLDVDITELHSWITRSEAVLQSPEFAIFRKEGNFSDLKEKVNAIEREKAEKFRKLQDASRSAQALVEQMVNEGVNADSIKQASEQLNSRWIEFCQLLSERLNWLEYQNNIIAFYNQLQQLEQMTTTAENWLKIQPTTPSEPTAIKSQLKICKDEVNRLSGLQPQIERLKIQSIALKEKGQGPMFLDADFVAFTNHFKQVFSDVQAREKELQTIFDTLPPMRYQETMSAIRTWVQQSETKLSIPQLSVTDYEIMEQRLGELQALQSSLQEQQSGLYYLSTTVKEMSKKAPSEISRKYQSEFEEIEGRWKKLSSQLVEHCQKLEEQMNKLRKIQNHIQTLKKWMAEVDVFLKEEWPALGDSEILKKQLKQCRLLVSDIQTIQPSLNSVNEGGQKIKNEAEPEFASRLETELKELNTQWDHMCQQVYARKEALKGGLEKTVSLQKDLSEMHEWMTQAEEEYLERDFEYKTPDELQKAVEEMKRAKEEAQQKEAKVKLLTESVNSVIAQAPPVAQEALKKELETLTTNYQWLCTRLNGKCKTLEEVWACWHELLSYLEKANKWLNEVEFKLKTTENIPGGAEEISEVLDSLENLMRHSEDNPNQIRILAQTLTDGGVMDELINEELETFNSRWRELHEEAVRRQKLLEQSIQSAQETEKSLHLIQESLTFIDKQLAAYIADKVDAAQMPQEAQKIQSDLTSHEISLEEMKKHNQGKEAAQRVLSQIDVAQKKLQDVSMKFRLFQKPANFEQRLQESKMILDEVKMHLPALETKSVEQEVVQSQLNHCVNLYKSLSEVKSEVEMVIKTGRQIVQKKQTENPKELDERVTALKLHYNELGAKVTERKQQLEKCLKLSRKMRKEMNVLTEWLAATDMELTKRSAVEGMPSNLDSEVAWGKATQKEIEKQKVHLKSITEVGEALKTVLGKKETLVEDKLSLLNSNWIAVTSRAEEWLNLLLEYQKHMETFDQNVDHITKWIIQADTLLDESEKKKPQQKEDVLKRLKAELNDIRPKVDSTRDQAANLMANRGDHCRKLVEPQISELNHRFAAISHRIKTGKASIPLKELEQFNSDIQKLLEPLEAEIQQGVNLKEEDFNKDMNEDNEGTVKELLQRGDNLQQRITDERKREEIKIKQQLLQTKHNALKDLRSQRRKKALEISHQWYQYKRQADDLLKCLDDIEKKLASLPEPRDERKIKEIDRELQKKKEELNAVRRQAEGLSEDGAAMAVEPTQIQLSKRWREIESKFAQFRRLNFAQIHTVREETMMVMTEDMPLEISYVPSTYLTEITHVSQALLEVEQLLNAPDLCAKDFEDLFKQEESLKNIKDSLQQSSGRIDIIHSKKTAALQSATPVERVKLQEALSQLDFQWEKVNKMYKDRQGRFDRSVEKWRRFHYDIKIFNQWLTEAEQFLRKTQIPENWEHAKYKWYLKELQDGIGQRQTVVRTLNATGEEIIQQSSKTDASILQEKLGSLNLRWQEVCKQLSDRKKRLEEQKNILSEFQRDLNEFVLWLEEADNIASIPLEPGKEQQLKEKLEQVKLLVEELPLRQGILKQLNETGGPVLVSAPISPEEQDKLENKLKQTNLQWIKVSRALPEKQGEIEAQIKDLGQLEKKLEDLEEQLNHLLLWLSPIRNQLEIYNQPNQEGPFDVQETEIAVQAKQPDVEEILSKGQHLYKEKPATQPVKRKLEDLSSEWKAVNRLLQELRAKQPDLAPGLTTIGASPTQTVTLVTQPVVTKETAISKLEMPSSLMLEVPALADFNRAWTELTDWLSLLDQVIKSQRVMVGDLEDINEMIIKQKATMQDLEQRRPQLEELITAAQNLKNKTSNQEARTIITDRIERIQNQWDEVQEHLQNRRQQLNEMLKDSTQWLEAKEEAEQVLGQARAKLESWKEGPYTVDAIQKKITETKQLAKDLRQWQTNVDVANDLALKLLRDYSADDTRKVHMITENINASWRSIHKRVSEREAALEETHRLLQQFPLDLEKFLAWLTEAETTANVLQDATRKERLLEDSKGVKELMKQWQDLQGEIEAHTDVYHNLDENSQKILRSLEGSDDAVLLQRRLDNMNFKWSELRKKSLNIRSHLEASSDQWKRLHLSLQELLVWLQLKDDELSRQAPIGGDFPAVQKQNDVHRAFKRELKTKEPVIMSTLETVRIFLTEQPLEGLEKLYQEPRELPPEERAQNVTRLLRKQAEEVNTEWEKLNLHSADWQRKIDETLERLQELQEATDELDLKLRQAEVIKGSWQPVGDLLIDSLQDHLEKVKALRGEIAPLKENVSHVNDLARQLTTLGIQLSPYNLSTLEDLNTRWKLLQVAVEDRVRQLHEAHRDFGPASQHFLSTSVQGPWERAISPNKVPYYINHETQTTCWDHPKMTELYQSLADLNNVRFSAYRTAMKLRRLQKALCLDLLSLSAACDALDQHNLKQNDQPMDILQIINCLTTIYDRLEQEHNNLVNVPLCVDMCLNWLLNVYDTGRTGRIRVLSFKTGIISLCKAHLEDKYRYLFKQVASSTGFCDQRRLGLLLHDSIQIPRQLGEVASFGGSNIEPSVRSCFQFANNKPEIEAALFLDWMRLEPQSMVWLPVLHRVAAAETAKHQAKCNICKECPIIGFRYRSLKHFNYDICQSCFFSGRVAKGHKMHYPMVEYCTPTTSGEDVRDFAKVLKNKFRTKRYFAKHPRMGYLPVQTVLEGDNMETPVTLINFWPVDSAPASSPQLSHDDTHSRIEHYASRLAEMENSNGSYLNDSISPNESIDDEHLLIQHYCQSLNQDSPLSQPRSPAQILISLESEERGELERILADLEEENRNLQAEYDRLKQQHEHKGLSPLPSPPEMMPTSPQSPRDAELIAEAKLLRQHKGRLEARMQILEDHNKQLESQLHRLRQLLEQPQAEAKVNGTTVSSPSTSLQRSDSSQPMLLRVVGSQTSDSMGEEDLLSPPQDTSTGLEEVMEQLNNSFPSSRGRNTPGKPMREDTM

SEQ ID NO: 386 - DNA, 13993 bp, Homo sapiens
tcctggcatcagttactgtgttgactcactcagtgttgggatcactcactttccccctacaggactcagatctgggaggcaattaccttcggagaaaaacgaataggaaaaactgaagtgttactttttttaaagctgctgaagtttgttggtttctcattgtttttaagcctactggagcaataaagtttgaagaacttttaccaggttttttttatcgctgccttgatatacacttttcaaaatgctttggtgggaagaagtagaggactgttatgaaagagaagatgttcaaaagaaaacattcacaaaatgggtaaatgcacaattttctaagtttgggaagcagcatattgagaacctcttcagtgacctacaggatgggaggcgcctcctagacctcctcgaaggcctgacagggcaaaaactgccaaaagaaaaaggatccacaagagttcatgccctgaacaatgtcaacaaggcactgcgggttttgcagaacaataatgttgatttagtgaatattggaagtactgacatcgtagatggaaatcataaactgactcttggtttgatttggaatataatcctccactggcaggtcaaaaatgtaatgaaaaatatcatggctggattgcaacaaaccaacagtgaaaagattctcctgagctgggtccgacaatcaactcgtaattatccacaggttaatgtaatcaacttcaccaccagctggtctgatggcctggctttgaatgctctcatccatagtcataggccagacctatttgactggaatagtgtggtttgccagcagtcagccacacaacgactggaacatgcattcaacatcgccagatatcaattaggcatagagaaactactcgatcctgaagatgttgataccacctatccagataagaagtccatcttaatgtacatcacatcactcttccaagttttgcctcaacaagtgagcattgaagccatccaggaagtggaaatgttgccaaggccacctaaagtgactaaagaagaacattttcagttacatcatcaaatgcactattctcaacagatcacggtcagtctagcacagggatatgagagaacttcttcccctaagcctcgattcaagagctatgcctacacacaggctgcttatgtcaccacctctgaccctacacggagcccatttccttcacagcatttggaagctcctgaagacaagtcatttggcagttcattgatggagagtgaagtaaacctggaccgttatcaaacagctttagaagaagtattatcgtggcttctttctgctgaggacacattgcaagcacaaggagagatttctaatgatgtggaagtggtgaaagaccagtttcatactcatgaggggtacatgatggatttgacagcccatcagggccgggttggtaatattctacaattgggaagtaagctgattggaacaggaaaattatcagaagatgaagaaactgaagtacaagagcagatgaatctcctaaattcaagatgggaatgcctcagggtagctagcatggaaaaacaaagcaatttacatagagttttaatggatctccagaatcagaaactgaaagagttgaatgactggctaacaaaaacagaagaaagaacaaggaaaatggaggaagagcctcttggacctgatcttgaagacctaaaacgccaagtacaacaacataaggtgcttcaagaagatctagaacaagaacaagtcagggtcaattctctcactcacatggtggtggtagttgatgaatctagtggagatcacgcaactgctgctttggaagaacaacttaaggtattgggagatcgatgggcaaacatctgtagatggacagaagaccgctgggttcttttacaagacatccttctcaaatggcaacgtcttactgaagaacagtgcctttttagtgcatggctttcagaaaaagaagatgcagtgaacaagattcacacaactggctttaaagatcaaaatgaaatgttatcaagtcttcaaaaactggccgttttaaaagcggatctagaaaagaaaaagcaatccatgggcaaactgtattcactcaaacaagatcttctttcaacactgaagaataagtcagtgacccagaagacggaagcatggctggataactttgcccggtgttgggataatttagtccaaaaacttgaaaagagtacagcacagatttcacaggctgtcaccaccactcagccatcactaacacagacaactgtaatggaaacagtaactacggtgaccacaagggaacagatcctggtaaagcatgctcaagaggaacttccaccaccacctccccaaaagaagaggcagattactgtggattctgaaattaggaaaaggttggatgttgatataactgaacttcacagctggattactcgctcagaagctgtgttgcagagtcctgaatttgcaatctttcggaaggaaggcaacttctcagacttaaaagaaaaagtcaatgccatagagcgagaaaaagctgagaagttcagaaaactgcaagatgccagcagatcagctcaggccctggtggaacagatggtgaatgagggtgttaatgcagatagcatcaaacaagcctcagaacaactgaacagccggtggatcgaattctgccagttgctaagtgagagacttaactggctggagtatcagaacaacatcatcgctttctataatcagctacaacaattggagcagatgacaactactgctgaaaactggttgaaaatccaacccaccaccccatcagagccaacagcaattaaaagtcagttaaaaatttgtaaggatgaagtcaaccggctatcaggtcttcaacctcaaattgaacgattaaaaattcaaagcatagccctgaaagagaaaggacaaggacccatgttcctggatgcagactttgtggcctttacaaatcattttaagcaagtcttttctgatgtgcaggccagagagaaagagctacagacaatttttgacactttgccaccaatgcgctatcaggagaccatgagtgccatcaggacatgggtccagcagtcagaaaccaaactctccatacctcaacttagtgtcaccgactatgaaatcatggagcagagactcggggaattgcaggctttacaaagttctctgcaagagcaacaaagtggcctatactatctcagcaccactgtgaaagagatgtcgaagaaagcgccctctgaaattagccggaaatatcaatcagaatttgaagaaattgagggacgctggaagaagctctcctcccagctggttgagcattgtcaaaagctagaggagcaaatgaataaactccgaaaaattcagaatcacatacaaaccctgaagaaatggatggctgaagttgatgtttttctgaaggaggaatggcctgcccttggggattcagaaattctaaaaaagcagctgaaacagtgcagacttttagtcagtgatattcagacaattcagcccagtctaaacagtgtcaatgaaggtgggcagaagataaagaatgaagcagagccagagtttgcttcgagacttgagacagaactcaaagaacttaacactcagtgggatcacatgtgccaacaggtctatgccagaaaggaggccttgaagggaggtttggagaaaactgtaagcctccagaaagatctatcagagatgcacgaatggatgacacaagctgaagaagagtatcttgagagagattttgaatataaaactccagatgaattacagaaagcagttgaagagatgaagagagctaaagaagaggcccaacaaaaagaagcgaaagtgaaactccttactgagtctgtaaatagtgtcatagctcaagctccacctgtagcacaagaggccttaaaaaaggaacttgaaactctaaccaccaactaccagtggctctgcactaggctgaatgggaaatgcaagactttggaagaagtttgggcatgttggcatgagttattgtcatacttggagaaagcaaacaagtggctaaatgaagtagaatttaaacttaaaaccactgaaaacattcctggcggagctgaggaaatctctgaggtgctagattcacttgaaaatttgatgcgacattcagaggataacccaaatcagattcgcatattggcacagaccctaacagatggcggagtcatggatgagctaatcaatgaggaacttgagacatttaattctcgttggagggaactacatgaagaggctgtaaggaggcaaaagttgcttgaacagagcatccagtctgcccaggagactgaaaaatccttacacttaatccaggagtccctcacattcattgacaagcagttggcagcttatattgcagacaaggtggacgcagctcaaatgcctcaggaagcccagaaaatccaatctgatttgacaagtcatgagatcagtttagaagaaatgaagaaacataatcaggggaaggaggctgcccaaagagtcctgtctcagattgatgttgcacagaaaaaattacaagatgtctccatgaagtttcgattattccagaaaccagccaattttgagcagcgtctacaagaaagtaagatgattttagatgaagtgaagatgcacttgcctgcattggaaacaaagagtgtggaacaggaagtagtacagtcacagctaaatcattgtgtgaacttgtataaaagtctgagtgaagtgaagtctgaagtggaaatggtgataaagactggacgtcagattgtacagaaaaagcagacggaaaatcccaaagaacttgatgaaagagtaacagctttgaaattgcattataatgagctgggagcaaaggtaacagaaagaaagcaacagttggagaaatgcttgaaattgtcccgtaagatgcgaaaggaaatgaatgtcttgacagaatggctggcagctacagatatggaattgacaaagagatcagcagttgaaggaatgcctagtaatttggattctgaagttgcctggggaaaggctactcaaaaagagattgagaaacagaaggtgcacctgaagagtatcacagaggtaggagaggccttgaaaacagttttgggcaagaaggagacgttggtggaagataaactcagtcttctgaatagtaactggatagctgtcacctcccgagcagaagagtggttaaatcttttgttggaataccagaaacacatggaaacttttgaccagaatgtggaccacatcacaaagtggatcattcaggctgacacacttttggatgaatcagagaaaaagaaaccccagcaaaaagaagacgtgcttaagcgtttaaaggcagaactgaatgacatacgcccaaaggtggactctacacgtgaccaagcagcaaacttgatggcaaaccgcggtgaccactgcaggaaattagtagagccccaaatctcagagctcaaccatcgatttgcagccatttcacacagaattaagactggaaaggcctccattcctttgaaggaattggagcagtttaactcagatatacaaaaattgcttgaaccactggaggctgaaattcagcagggggtgaatctgaaagaggaagacttcaataaagatatgaatgaagacaatgagggtactgtaaaagaattgttgcaaagaggagacaacttacaacaaagaatcacagatgagagaaagcgagaggaaataaagataaaacagcagctgttacagacaaaacataatgctctcaaggatttgaggtctcaaagaagaaaaaaggctctagaaatttctcatcagtggtatcagtacaagaggcaggctgatgatctcctgaaatgcttggatgacattgaaaaaaaattagccagcctacctgagcccagagatgaaaggaaaataaaggaaattgatcgggaattgcagaagaagaaagaggagctgaatgcagtgcgtaggcaagctgagggcttgtctgaggatggggccgcaatggcagtggagccaactcagatccagctcagcaagcgctggcgggaaattgagagcaaatttgctcagtttcgaagactcaactttgcacaaattcacactgtccgtgaagaaacgatgatggtgatgactgaagacatgcctttggaaatttcttatgtgccttctacttatttgactgaaatcactcatgtctcacaagccctattagaagtggaacaacttctcaatgctcctgacctctgtgctaaggactttgaagatctctttaagcaagaggagtctctgaagaatataaaagatagtctacaacaaagctcaggtcggattgacattattcatagcaagaagacagcagcattgcaaagtgcaacgcctgtggaaagggtgaagctacaggaagctctctcccagcttgatttccaatgggaaaaagttaacaaaatgtacaaggaccgacaagggcgatttgacagatctgttgagaaatggcggcgttttcattatgatataaagatatttaatcagtggctaacagaagctgaacagtttctcagaaagacacaaattcctgagaattgggaacatgctaaatacaaatggtatcttaaggaactccaggatggcattgggcagcggcaaactgttgtcagaacattgaatgcaactggggaagaaataattcagcaatcctcaaaaacagatgccagtattctacaggaaaaattgggaagcctgaatctgcggtggcaggaggtctgcaaacagctgtcagacagaaaaaagaggctagaagaacaaaagaatatcttgtcagaatttcaaagagatttaaatgaatttgttttatggttggaggaagcagataacattgctagtatcccacttgaacctggaaaagagcagcaactaaaagaaaagcttgagcaagtcaagttactggtggaagagttgcccctgcgccagggaattctcaaacaattaaatgaaactggaggacccgtgcttgtaagtgctcccataagcccagaagagcaagataaacttgaaaataagctcaagcagacaaatctccagtggataaaggtttccagagctttacctgagaaacaaggagaaattgaagctcaaataaaagaccttgggcagcttgaaaaaaagcttgaagaccttgaagagcagttaaatcatctgctgctgtggttatctcctattaggaatcagttggaaatttataaccaaccaaaccaagaaggaccatttgacgttcaggaaactgaaatagcagttcaagctaaacaaccggatgtggaagagattttgtctaaagggcagcatttgtacaaggaaaaaccagccactcagccagtgaagaggaagttagaagatctgagctctgagtggaaggcggtaaaccgtttacttcaagagctgagggcaaagcagcctgacctagctcctggactgaccactattggagcctctcctactcagactgttactctggtgacacaacctgtggttactaaggaaactgccatctccaaactagaaatgccatcttccttgatgttggaggtacctgctctggcagatttcaaccgggcttggacagaacttaccgactggctttctctgcttgatcaagttataaaatcacagagggtgatggtgggtgaccttgaggatatcaacgagatgatcatcaagcagaaggcaacaatgcaggatttggaacagaggcgtccccagttggaagaactcattaccgctgcccaaaatttgaaaaacaagaccagcaatcaagaggctagaacaatcattacggatcgaattgaaagaattcagaatcagtgggatgaagtacaagaacaccttcagaaccggaggcaacagttgaatgaaatgttaaaggattcaacacaatggctggaagctaaggaagaagctgagcaggtcttaggacaggccagagccaagcttgagtcatggaaggagggtccctatacagtagatgcaatccaaaagaaaatcacagaaaccaagcagttggccaaagacctccgccagtggcagacaaatgtagatgtggcaaatgacttggccctgaaacttctccgggattattctgcagatgataccagaaaagtccacatgataacagagaatatcaatgcctcttggagaagcattcataaaagggtgagtgagcgagaggctgctttggaagaaactcatagattactgcaacagttccccctggacctggaaaagtttcttgcctggcttacagaagctgaaacaactgccaatgtcctacaggatgctacccgtaaggaaaggctcctagaagactccaagggagtaaaagagctgatgaaacaatggcaagacctccaaggtgaaattgaagctcacacagatgtttatcacaacctggatgaaaacagccaaaaaatcctgagatccctggaaggttccgatgatgcagtcctgttacaaagacgtttggataacatgaacttcaagtggagtgaacttcggaaaaagtctctcaacattaggtcccatttggaagccagttctgaccagtggaagcgtctgcacctttctctgcaggaacttctggtgtggctacagctgaaagatgatgaattaagccggcaggcacctattggaggcgactttccagcagttcagaagcagaacgatgtacatagggccttcaagagggaattgaaaactaaagaacctgtaatcatgagtactcttgagactgtacgaatatttctgacagagcagcctttggaaggactagagaaactctaccaggagcccagagagctgcctcctgaggagagagcccagaatgtcactcggcttctacgaaagcaggctgaggaggtcaatactgagtgggaaaaattgaacctgcactccgctgactggcagagaaaaatagatgagacccttgaaagactccaggaacttcaagaggccacggatgagctggacctcaagctgcgccaagctgaggtgatcaagggatcctggcagcccgtgggcgatctcctcattgactctctccaagatcacctcgagaaagtcaaggcacttcgaggagaaattgcgcctctgaaagagaacgtgagccacgtcaatgaccttgctcgccagcttaccactttgggcattcagctctcaccgtataacctcagcactctggaagacctgaacaccagatggaagcttctgcaggtggccgtcgaggaccgagtcaggcagctgcatgaagcccacagggactttggtccagcatctcagcactttctttccacgtctgtccagggtccctgggagagagccatctcgccaaacaaagtgccctactatatcaaccacgagactcaaacaacttgctgggaccatcccaaaatgacagagctctaccagtctttagctgacctgaataatgtcagattctcagcttataggactgccatgaaactccgaagactgcagaaggccctttgcttggatctcttgagcctgtcagctgcatgtgatgccttggaccagcacaacctcaagcaaaatgaccagcccatggatatcctgcagattattaattgtttgaccactatttatgaccgcctggagcaagagcacaacaatttggtcaacgtccctctctgcgtggatatgtgtctgaactggctgctgaatgtttatgatacgggacgaacagggaggatccgtgtcctgtcttttaaaactggcatcatttccctgtgtaaagcacatttggaagacaagtacagataccttttcaagcaagtggcaagttcaacaggattttgtgaccagcgcaggctgggcctccttctgcatgattctatccaaattccaagacagttgggtgaagttgcatcctttgggggcagtaacattgagccaagtgtccggagctgcttccaatttgctaataataagccagagatcgaagcggccctcttcctagactggatgagactggaaccccagtccatggtgtggctgcccgtcctgcacagagtggctgctgcagaaactgccaagcatcaggccaaatgtaacatctgcaaagagtgtccaatcattggattcaggtacaggagtctaaagcactttaattatgacatctgccaaagctgctttttttctggtcgagttgcaaaaggccataaaatgcactatcccatggtggaatattgcactccgactacatcaggagaagatgttcgagactttgccaaggtactaaaaaacaaatttcgaaccaaaaggtattttgcgaagcatccccgaatgggctacctgccagtgcagactgtcttagagggggacaacatggaaactcccgttactctgatcaacttctggccagtagattctgcgcctgcctcgtcccctcagctttcacacgatgatactcattcacgcattgaacattatgctagcaggctagcagaaatggaaaacagcaatggatcttatctaaatgatagcatctctcctaatgagagcatagatgatgaacatttgttaatccagcattactgccaaagtttgaaccaggactcccccctgagccagcctcgtagtcctgcccagatcttgatttccttagagagtgaggaaagaggggagctagagagaatcctagcagatcttgaggaagaaaacaggaatctgcaagcagaatatgaccgtctaaagcagcagcacgaacataaaggcctgtccccactgccgtcccctcctgaaatgatgcccacctctccccagagtccccgggatgctgagctcattgctgaggccaagctactgcgtcaacacaaaggccgcctggaagccaggatgcaaatcctggaagaccacaataaacagctggagtcacagttacacaggctaaggcagctgctggagcaaccccaggcagaggccaaagtgaatggcacaacggtgtcctctccttctacctctctacagaggtccgacagcagtcagcctatgctgctccgagtggttggcagtcaaacttcggactccatgggtgaggaagatcttctcagtcctccccaggacacaagcacagggttagaggaggtgatggagcaactcaacaactccttccctagttcaagaggaagaaatacccctggaaagccaatgagagaggacacaatgtaggaagtcttttccacatggcagatgatttgggcagagcgatggagtccttagtatcagtcatgacagatgaagaaggagcagaataaatgttttacaactcctgattcccgcatggtttttataatattcatacaacaaagaggattagacagtaagagtttacaagaaataaatctatatttttgtgaagggtagtggtattatactgtagatttcagtagtttctaagtctgttattgttttgttaacaatggcaggttttacacgtctatgcaattgtacaaaaaagttataagaaaactacatgtaaaatcttgatagctaaataacttgccatttctttatatggaacgcattttgggttgtttaaaaatttataacagttataaagaaagattgtaaactaaagtgtgctttataaaaaaaagttgtttataaaaacccctaaaaacaaaacaaacacacacacacacacatacacacacacacacaaaactttgaggcagcgcattgttttgcatccttttggcgtgatatccatatgaaattcatggctttttctttttttgcatattaaagataagacttcctctaccaccacaccaaatgactactacacactgctcatttgagaactgtcagctgagtggggcaggcttgagttttcatttcatatatctatatgtctataagtatataaatactatagttatatagataaagagatacgaatttctatagactgactttttccattttttaaatgttcatgtcacatcctaatagaaagaaattacttctagtcagtcatccaggcttacctgcttggtctagaatggatttttcccggagccggaagccaggaggaaactacaccacactaaaacattgtctacagctccagatgtttctcattttaaacaactttccactgacaacgaaagtaaagtaaagtattggatttttttaaagggaacatgtgaatgaatacacaggacttattatatcagagtgagtaatcggttggttggttgattgattgattgattgatacattcagcttcctgctgctagcaatgccacgatttagatttaatgatgcttcagtggaaatcaatcagaaggtattctgaccttgtgaacatcagaaggtattttttaactcccaagcagtagcaggacgatgatagggctggagggctatggattcccagcccatccctgtgaaggagtaggccactctttaagtgaaggattggatgattgttcataatacataaagttctctgtaattacaactaaattattatgccctcttctcacagtcaaaaggaactgggtggtttggtttttgttgcttttttagatttattgtcccatgtgggatgagtttttaaatgccacaagacataatttaaaataaataaactttgggaaaaggtgtaaaacagtagccccatcacatttgtgatactgacaggtatcaacccagaagcccatgaactgtgtttccatcctttgcatttctctgcgagtagttccacacaggtttgtaagtaagtaagaaagaaggcaaattgattcaaatgttacaaaaaaacccttcttggtggattagacaggttaaatatataaacaaacaaacaaaaattgctcaaaaaagaggagaaaagctcaagaggaaaagctaaggactggtaggaaaaagctttactctttcatgccattttatttctttttgatttttaaatcattcattcaatagataccaccgtgtgacctataattttgcaaatctgttacctctgacatcaagtgtaattagcttttggagagtgggctgacatcaagtgtaattagcttttggagagtgggttttgtccattattaataattaattaattaacatcaaacacggcttctcatgctatttctacctcactttggttttggggtgttcctgataattgtgcacacctgagttcacagcttcaccacttgtccattgcgttattttctttttcctttataattctttctttttccttcataattttcaaaagaaaacccaaagctctaaggtaacaaattaccaaattacatgaagatttggtttttgtcttgcatttttttcctttatgtgacgctggaccttttctttacccaaggatttttaaaactcagatttaaaacaaggggttactttacatcctactaagaagtttaagtaagtaagtttcattctaaaatcagaggtaaatagagtgcataaataattttgttttaatctttttgtttttcttttagacacattagctctggagtgagtctgtcataatatttgaacaaaaattgagagctttattgctgcattttaagcataattaatttggacattatttcgtgttgtgttctttataaccaccaagtattaaactgtaaatcataatgtaactgaagcataaacatcacatggcatgttttgtcattgttttcaggtactgagttcttacttgagtatcataatatattgtgttttaacaccaacactgtaacatttacgaattatttttttaaacttcagttttactgcattttcacaacatatcagacttcaccaaatatatgccttactattgtattatagtactgctttactgtgtatctcaataaagcacgcagttatgttac

SEQ ID NO: 387 - protein, 3685 aa, Homo sapiens
MLWWEEVEDCYEREDVQKKTFTKWVNAQFSKFGKQHIENLFSDLQDGRRLLDLLEGLTGQKLPKEKGSTRVHALNNVNKALRVLQNNNVDLVNIGSTDIVDGNHKLTLGLIWNIILHWQVKNVMKNIMAGLQQTNSEKILLSWVRQSTRNYPQVNVINFTTSWSDGLALNALIHSHRPDLFDWNSVVCQQSATQRLEHAFNIARYQLGIEKLLDPEDVDTTYPDKKSILMYITSLFQVLPQQVSIEAIQEVEMLPRPPKVTKEEHFQLHHQMHYSQQITVSLAQGYERTSSPKPRFKSYAYTQAAYVTTSDPTRSPFPSQHLEAPEDKSFGSSLMESEVNLDRYQTALEEVLSWLLSAEDTLQAQGEISNDVEVVKDQFHTHEGYMMDLTAHQGRVGNILQLGSKLIGTGKLSEDEETEVQEQMNLLNSRWECLRVASMEKQSNLHRVLMDLQNQKLKELNDWLTKTEERTRKMEEEPLGPDLEDLKRQVQQHKVLQEDLEQEQVRVNSLTHMVVVVDESSGDHATAALEEQLKVLGDRWANICRWTEDRWVLLQDILLKWQRLTEEQCLFSAWLSEKEDAVNKIHTTGFKDQNEMLSSLQKLAVLKADLEKKKQSMGKLYSLKQDLLSTLKNKSVTQKTEAWLDNFARCWDNLVQKLEKSTAQISQAVTTTQPSLTQTTVMETVTTVTTREQILVKHAQEELPPPPPQKKRQITVDSEIRKRLDVDITELHSWITRSEAVLQSPEFAIFRKEGNFSDLKEKVNAIEREKAEKFRKLQDASRSAQALVEQMVNEGVNADSIKQASEQLNSRWIEFCQLLSERLNWLEYQNNIIAFYNQLQQLEQMTTTAENWLKIQPTTPSEPTAIKSQLKICKDEVNRLSGLQPQIERLKIQSIALKEKGQGPMFLDADFVAFTNHFKQVFSDVQAREKELQTIFDTLPPMRYQETMSAIRTWVQQSETKLSIPQLSVTDYEIMEQRLGELQALQSSLQEQQSGLYYLSTTVKEMSKKAPSEISRKYQSEFEEIEGRWKKLSSQLVEHCQKLEEQMNKLRKIQNHIQTLKKWMAEVDVFLKEEWPALGDSEILKKQLKQCRLLVSDIQTIQPSLNSVNEGGQKIKNEAEPEFASRLETELKELNTQWDHMCQQVYARKEALKGGLEKTVSLQKDLSEMHEWMTQAEEEYLERDFEYKTPDELQKAVEEMKRAKEEAQQKEAKVKLLTESVNSVIAQAPPVAQEALKKELETLTTNYQWLCTRLNGKCKTLEEVWACWHELLSYLEKANKWLNEVEFKLKTTENIPGGAEEISEVLDSLENLMRHSEDNPNQIRILAQTLTDGGVMDELINEELETFNSRWRELHEEAVRRQKLLEQSIQSAQETEKSLHLIQESLTFIDKQLAAYIADKVDAAQMPQEAQKIQSDLTSHEISLEEMKKHNQGKEAAQRVLSQIDVAQKKLQDVSMKFRLFQKPANFEQRLQESKMILDEVKMHLPALETKSVEQEVVQSQLNHCVNLYKSLSEVKSEVEMVIKTGRQIVQKKQTENPKELDERVTALKLHYNELGAKVTERKQQLEKCLKLSRKMRKEMNVLTEWLAATDMELTKRSAVEGMPSNLDSEVAWGKATQKEIEKQKVHLKSITEVGEALKTVLGKKETLVEDKLSLLNSNWIAVTSRAEEWLNLLLEYQKHMETFDQNVDHITKWIIQADTLLDESEKKKPQQKEDVLKRLKAELNDIRPKVDSTRDQAANLMANRGDHCRKLVEPQISELNHRFAAISHRIKTGKASIPLKELEQFNSDIQKLLEPLEAEIQQGVNLKEEDFNKDMNEDNEGTVKELLQRGDNLQQRITDERKREEIKIKQQLLQTKHNALKDLRSQRRKKALEISHQWYQYKRQADDLLKCLDDIEKKLASLPEPRDERKIKEIDRELQKKKEELNAVRRQAEGLSEDGAAMAVEPTQIQLSKRWREIESKFAQFRRLNFAQIHTVREETMMVMTEDMPLEISYVPSTYLTEITHVSQALLEVEQLLNAPDLCAKDFEDLFKQEESLKNIKDSLQQSSGRIDIIHSKKTAALQSATPVERVKLQEALSQLDFQWEKVNKMYKDRQGRFDRSVEKWRRFHYDIKIFNQWLTEAEQFLRKTQIPENWEHAKYKWYLKELQDGIGQRQTVVRTLNATGEEIIQQSSKTDASILQEKLGSLNLRWQEVCKQLSDRKKRLEEQKNILSEFQRDLNEFVLWLEEADNIASIPLEPGKEQQLKEKLEQVKLLVEELPLRQGILKQLNETGGPVLVSAPISPEEQDKLENKLKQTNLQWIKVSRALPEKQGEIEAQIKDLGQLEKKLEDLEEQLNHLLLWLSPIRNQLEIYNQPNQEGPFDVQETEIAVQAKQPDVEEILSKGQHLYKEKPATQPVKRKLEDLSSEWKAVNRLLQELRAKQPDLAPGLTTIGASPTQTVTLVTQPVVTKETAISKLEMPSSLMLEVPALADFNRAWTELTDWLSLLDQVIKSQRVMVGDLEDINEMIIKQKATMQDLEQRRPQLEELITAAQNLKNKTSNQEARTIITDRIERIQNQWDEVQEHLQNRRQQLNEMLKDSTQWLEAKEEAEQVLGQARAKLESWKEGPYTVDAIQKKITETKQLAKDLRQWQTNVDVANDLALKLLRDYSADDTRKVHMITENINASWRSIHKRVSEREAALEETHRLLQQFPLDLEKFLAWLTEAETTANVLQDATRKERLLEDSKGVKELMKQWQDLQGEIEAHTDVYHNLDENSQKILRSLEGSDDAVLLQRRLDNMNFKWSELRKKSLNIRSHLEASSDQWKRLHLSLQELLVWLQLKDDELSRQAPIGGDFPAVQKQNDVHRAFKRELKTKEPVIMSTLETVRIFLTEQPLEGLEKLYQEPRELPPEERAQNVTRLLRKQAEEVNTEWEKLNLHSADWQRKIDETLERLQELQEATDELDLKLRQAEVIKGSWQPVGDLLIDSLQDHLEKVKALRGEIAPLKENVSHVNDLARQLTTLGIQLSPYNLSTLEDLNTRWKLLQVAVEDRVRQLHEAHRDFGPASQHFLSTSVQGPWERAISPNKVPYYINHETQTTCWDHPKMTELYQSLADLNNVRFSAYRTAMKLRRLQKALCLDLLSLSAACDALDQHNLKQNDQPMDILQIINCLTTIYDRLEQEHNNLVNVPLCVDMCLNWLLNVYDTGRTGRIRVLSFKTGIISLCKAHLEDKYRYLFKQVASSTGFCDQRRLGLLLHDSIQIPRQLGEVASFGGSNIEPSVRSCFQFANNKPEIEAALFLDWMRLEPQSMVWLPVLHRVAAAETAKHQAKCNICKECPIIGFRYRSLKHFNYDICQSCFFSGRVAKGHKMHYPMVEYCTPTTSGEDVRDFAKVLKNKFRTKRYFAKHPRMGYLPVQTVLEGDNMETPVTLINFWPVDSAPASSPQLSHDDTHSRIEHYASRLAEMENSNGSYLNDSISPNESIDDEHLLIQHYCQSLNQDSPLSQPRSPAQILISLESEERGELERILADLEEENRNLQAEYDRLKQQHEHKGLSPLPSPPEMMPTSPQSPRDAELIAEAKLLRQHKGRLEARMQILEDHNKQLESQLHRLRQLLEQPQAEAKVNGTTVSSPSTSLQRSDSSQPMLLRVVGSQTSDSMGEEDLLSPPQDTSTGLEEVMEQLNNSFPSSRGRNTPGKPMREDTM

SEQ ID NO: 388 - DNA, 14000 bp, Homo sapiens
atgctgtctgtgaagctgaatctgtgagaacacctcactattcacggcaaccggagtggaagaaacaggtgcaaaaagattgtgtgtttgtctgcttttgtgaggctggtcagagattctgtgcctgctttatctgtgcttggctatgactctacctccaggtttaccataccccatagaatgtgtaagagaaaagtaccaacagggaaatcagcaaaaagctttcctatgaaggtgtgtagccagcctccgcagaatttgaaatgtctgaggtctcatctgatgaaagagaagatgttcaaaagaaaacattcacaaaatgggtaaatgcacaattttctaagtttgggaagcagcatattgagaacctcttcagtgacctacaggatgggaggcgcctcctagacctcctcgaaggcctgacagggcaaaaactgccaaaagaaaaaggatccacaagagttcatgccctgaacaatgtcaacaaggcactgcgggttttgcagaacaataatgttgatttagtgaatattggaagtactgacatcgtagatggaaatcataaactgactcttggtttgatttggaatataatcctccactggcaggtcaaaaatgtaatgaaaaatatcatggctggattgcaacaaaccaacagtgaaaagattctcctgagctgggtccgacaatcaactcgtaattatccacaggttaatgtaatcaacttcaccaccagctggtctgatggcctggctttgaatgctctcatccatagtcataggccagacctatttgactggaatagtgtggtttgccagcagtcagccacacaacgactggaacatgcattcaacatcgccagatatcaattaggcatagagaaactactcgatcctgaagatgttgataccacctatccagataagaagtccatcttaatgtacatcacatcactcttccaagttttgcctcaacaagtgagcattgaagccatccaggaagtggaaatgttgccaaggccacctaaagtgactaaagaagaacattttcagttacatcatcaaatgcactattctcaacagatcacggtcagtctagcacagggatatgagagaacttcttcccctaagcctcgattcaagagctatgcctacacacaggctgcttatgtcaccacctctgaccctacacggagcccatttccttcacagcatttggaagctcctgaagacaagtcatttggcagttcattgatggagagtgaagtaaacctggaccgttatcaaacagctttagaagaagtattatcgtggcttctttctgctgaggacacattgcaagcacaaggagagatttctaatgatgtggaagtggtgaaagaccagtttcatactcatgaggggtacatgatggatttgacagcccatcagggccgggttggtaatattctacaattgggaagtaagctgattggaacaggaaaattatcagaagatgaagaaactgaagtacaagagcagatgaatctcctaaattcaagatgggaatgcctcagggtagctagcatggaaaaacaaagcaatttacatagagttttaatggatctccagaatcagaaactgaaagagttgaatgactggctaacaaaaacagaagaaagaacaaggaaaatggaggaagagcctcttggacctgatcttgaagacctaaaacgccaagtacaacaacataaggtgcttcaagaagatctagaacaagaacaagtcagggtcaattctctcactcacatggtggtggtagttgatgaatctagtggagatcacgcaactgctgctttggaagaacaacttaaggtattgggagatcgatgggcaaacatctgtagatggacagaagaccgctgggttcttttacaagacatccttctcaaatggcaacgtcttactgaagaacagtgcctttttagtgcatggctttcagaaaaagaagatgcagtgaacaagattcacacaactggctttaaagatcaaaatgaaatgttatcaagtcttcaaaaactggccgttttaaaagcggatctagaaaagaaaaagcaatccatgggcaaactgtattcactcaaacaagatcttctttcaacactgaagaataagtcagtgacccagaagacggaagcatggctggataactttgcccggtgttgggataatttagtccaaaaacttgaaaagagtacagcacagatttcacaggctgtcaccaccactcagccatcactaacacagacaactgtaatggaaacagtaactacggtgaccacaagggaacagatcctggtaaagcatgctcaagaggaacttccaccaccacctccccaaaagaagaggcagattactgtggattctgaaattaggaaaaggttggatgttgatataactgaacttcacagctggattactcgctcagaagctgtgttgcagagtcctgaatttgcaatctttcggaaggaaggcaacttctcagacttaaaagaaaaagtcaatgccatagagcgagaaaaagctgagaagttcagaaaactgcaagatgccagcagatcagctcaggccctggtggaacagatggtgaatgagggtgttaatgcagatagcatcaaacaagcctcagaacaactgaacagccggtggatcgaattctgccagttgctaagtgagagacttaactggctggagtatcagaacaacatcatcgctttctataatcagctacaacaattggagcagatgacaactactgctgaaaactggttgaaaatccaacccaccaccccatcagagccaacagcaattaaaagtcagttaaaaatttgtaaggatgaagtcaaccggctatcaggtcttcaacctcaaattgaacgattaaaaattcaaagcatagccctgaaagagaaaggacaaggacccatgttcctggatgcagactttgtggcctttacaaatcattttaagcaagtcttttctgatgtgcaggccagagagaaagagctacagacaatttttgacactttgccaccaatgcgctatcaggagaccatgagtgccatcaggacatgggtccagcagtcagaaaccaaactctccatacctcaacttagtgtcaccgactatgaaatcatggagcagagactcggggaattgcaggctttacaaagttctctgcaagagcaacaaagtggcctatactatctcagcaccactgtgaaagagatgtcgaagaaagcgccctctgaaattagccggaaatatcaatcagaatttgaagaaattgagggacgctggaagaagctctcctcccagctggttgagcattgtcaaaagctagaggagcaaatgaataaactccgaaaaattcagaatcacatacaaaccctgaagaaatggatggctgaagttgatgtttttctgaaggaggaatggcctgcccttggggattcagaaattctaaaaaagcagctgaaacagtgcagacttttagtcagtgatattcagacaattcagcccagtctaaacagtgtcaatgaaggtgggcagaagataaagaatgaagcagagccagagtttgcttcgagacttgagacagaactcaaagaacttaacactcagtgggatcacatgtgccaacaggtctatgccagaaaggaggccttgaagggaggtttggagaaaactgtaagcctccagaaagatctatcagagatgcacgaatggatgacacaagctgaagaagagtatcttgagagagattttgaatataaaactccagatgaattacagaaagcagttgaagagatgaagagagctaaagaagaggcccaacaaaaagaagcgaaagtgaaactccttactgagtctgtaaatagtgtcatagctcaagctccacctgtagcacaagaggccttaaaaaaggaacttgaaactctaaccaccaactaccagtggctctgcactaggctgaatgggaaatgcaagactttggaagaagtttgggcatgttggcatgagttattgtcatacttggagaaagcaaacaagtggctaaatgaagtagaatttaaacttaaaaccactgaaaacattcctggcggagctgaggaaatctctgaggtgctagattcacttgaaaatttgatgcgacattcagaggataacccaaatcagattcgcatattggcacagaccctaacagatggcggagtcatggatgagctaatcaatgaggaacttgagacatttaattctcgttggagggaactacatgaagaggctgtaaggaggcaaaagttgcttgaacagagcatccagtctgcccaggagactgaaaaatccttacacttaatccaggagtccctcacattcattgacaagcagttggcagcttatattgcagacaaggtggacgcagctcaaatgcctcaggaagcccagaaaatccaatctgatttgacaagtcatgagatcagtttagaagaaatgaagaaacataatcaggggaaggaggctgcccaaagagtcctgtctcagattgatgttgcacagaaaaaattacaagatgtctccatgaagtttcgattattccagaaaccagccaattttgagcagcgtctacaagaaagtaagatgattttagatgaagtgaagatgcacttgcctgcattggaaacaaagagtgtggaacaggaagtagtacagtcacagctaaatcattgtgtgaacttgtataaaagtctgagtgaagtgaagtctgaagtggaaatggtgataaagactggacgtcagattgtacagaaaaagcagacggaaaatcccaaagaacttgatgaaagagtaacagctttgaaattgcattataatgagctgggagcaaaggtaacagaaagaaagcaacagttggagaaatgcttgaaattgtcccgtaagatgcgaaaggaaatgaatgtcttgacagaatggctggcagctacagatatggaattgacaaagagatcagcagttgaaggaatgcctagtaatttggattctgaagttgcctggggaaaggctactcaaaaagagattgagaaacagaaggtgcacctgaagagtatcacagaggtaggagaggccttgaaaacagttttgggcaagaaggagacgttggtggaagataaactcagtcttctgaatagtaactggatagctgtcacctcccgagcagaagagtggttaaatcttttgttggaataccagaaacacatggaaacttttgaccagaatgtggaccacatcacaaagtggatcattcaggctgacacacttttggatgaatcagagaaaaagaaaccccagcaaaaagaagacgtgcttaagcgtttaaaggcagaactgaatgacatacgcccaaaggtggactctacacgtgaccaagcagcaaacttgatggcaaaccgcggtgaccactgcaggaaattagtagagccccaaatctcagagctcaaccatcgatttgcagccatttcacacagaattaagactggaaaggcctccattcctttgaaggaattggagcagtttaactcagatatacaaaaattgcttgaaccactggaggctgaaattcagcagggggtgaatctgaaagaggaagacttcaataaagatatgaatgaagacaatgagggtactgtaaaagaattgttgcaaagaggagacaacttacaacaaagaatcacagatgagagaaagcgagaggaaataaagataaaacagcagctgttacagacaaaacataatgctctcaaggatttgaggtctcaaagaagaaaaaaggctctagaaatttctcatcagtggtatcagtacaagaggcaggctgatgatctcctgaaatgcttggatgacattgaaaaaaaattagccagcctacctgagcccagagatgaaaggaaaataaaggaaattgatcgggaattgcagaagaagaaagaggagctgaatgcagtgcgtaggcaagctgagggcttgtctgaggatggggccgcaatggcagtggagccaactcagatccagctcagcaagcgctggcgggaaattgagagcaaatttgctcagtttcgaagactcaactttgcacaaattcacactgtccgtgaagaaacgatgatggtgatgactgaagacatgcctttggaaatttcttatgtgccttctacttatttgactgaaatcactcatgtctcacaagccctattagaagtggaacaacttctcaatgctcctgacctctgtgctaaggactttgaagatctctttaagcaagaggagtctctgaagaatataaaagatagtctacaacaaagctcaggtcggattgacattattcatagcaagaagacagcagcattgcaaagtgcaacgcctgtggaaagggtgaagctacaggaagctctctcccagcttgatttccaatgggaaaaagttaacaaaatgtacaaggaccgacaagggcgatttgacagatctgttgagaaatggcggcgttttcattatgatataaagatatttaatcagtggctaacagaagctgaacagtttctcagaaagacacaaattcctgagaattgggaacatgctaaatacaaatggtatcttaaggaactccaggatggcattgggcagcggcaaactgttgtcagaacattgaatgcaactggggaagaaataattcagcaatcctcaaaaacagatgccagtattctacaggaaaaattgggaagcctgaatctgcggtggcaggaggtctgcaaacagctgtcagacagaaaaaagaggctagaagaacaaaagaatatcttgtcagaatttcaaagagatttaaatgaatttgttttatggttggaggaagcagataacattgctagtatcccacttgaacctggaaaagagcagcaactaaaagaaaagcttgagcaagtcaagttactggtggaagagttgcccctgcgccagggaattctcaaacaattaaatgaaactggaggacccgtgcttgtaagtgctcccataagcccagaagagcaagataaacttgaaaataagctcaagcagacaaatctccagtggataaaggtttccagagctttacctgagaaacaaggagaaattgaagctcaaataaaagaccttgggcagcttgaaaaaaagcttgaagaccttgaagagcagttaaatcatctgctgctgtggttatctcctattaggaatcagttggaaatttataaccaaccaaaccaagaaggaccatttgacgttcaggaaactgaaatagcagttcaagctaaacaaccggatgtggaagagattttgtctaaagggcagcatttgtacaaggaaaaaccagccactcagccagtgaagaggaagttagaagatctgagctctgagtggaaggcggtaaaccgtttacttcaagagctgagggcaaagcagcctgacctagctcctggactgaccactattggagcctctcctactcagactgttactctggtgacacaacctgtggttactaaggaaactgccatctccaaactagaaatgccatcttccttgatgttggaggtacctgctctggcagatttcaaccgggcttggacagaacttaccgactggctttctctgcttgatcaagttataaaatcacagagggtgatggtgggtgaccttgaggatatcaacgagatgatcatcaagcagaaggcaacaatgcaggatttggaacagaggcgtccccagttggaagaactcattaccgctgcccaaaatttgaaaaacaagaccagcaatcaagaggctagaacaatcattacggatcgaattgaaagaattcagaatcagtgggatgaagtacaagaacaccttcagaaccggaggcaacagttgaatgaaatgttaaaggattcaacacaatggctggaagctaaggaagaagctgagcaggtcttaggacaggccagagccaagcttgagtcatggaaggagggtccctatacagtagatgcaatccaaaagaaaatcacagaaaccaagcagttggccaaagacctccgccagtggcagacaaatgtagatgtggcaaatgacttggccctgaaacttctccgggattattctgcagatgataccagaaaagtccacatgataacagagaatatcaatgcctcttggagaagcattcataaaagggtgagtgagcgagaggctgctttggaagaaactcatagattactgcaacagttccccctggacctggaaaagtttcttgcctggcttacagaagctgaaacaactgccaatgtcctacaggatgctacccgtaaggaaaggctcctagaagactccaagggagtaaaagagctgatgaaacaatggcaagacctccaaggtgaaattgaagctcacacagatgtttatcacaacctggatgaaaacagccaaaaaatcctgagatccctggaaggttccgatgatgcagtcctgttacaaagacgtttggataacatgaacttcaagtggagtgaacttcggaaaaagtctctcaacattaggtcccatttggaagccagttctgaccagtggaagcgtctgcacctttctctgcaggaacttctggtgtggctacagctgaaagatgatgaattaagccggcaggcacctattggaggcgactttccagcagttcagaagcagaacgatgtacatagggccttcaagagggaattgaaaactaaagaacctgtaatcatgagtactcttgagactgtacgaatatttctgacagagcagcctttggaaggactagagaaactctaccaggagcccagagagctgcctcctgaggagagagcccagaatgtcactcggcttctacgaaagcaggctgaggaggtcaatactgagtgggaaaaattgaacctgcactccgctgactggcagagaaaaatagatgagacccttgaaagactccaggaacttcaagaggccacggatgagctggacctcaagctgcgccaagctgaggtgatcaagggatcctggcagcccgtgggcgatctcctcattgactctctccaagatcacctcgagaaagtcaaggcacttcgaggagaaattgcgcctctgaaagagaacgtgagccacgtcaatgaccttgctcgccagcttaccactttgggcattcagctctcaccgtataacctcagcactctggaagacctgaacaccagatggaagcttctgcaggtggccgtcgaggaccgagtcaggcagctgcatgaagcccacagggactttggtccagcatctcagcactttctttccacgtctgtccagggtccctgggagagagccatctcgccaaacaaagtgccctactatatcaaccacgagactcaaacaacttgctgggaccatcccaaaatgacagagctctaccagtctttagctgacctgaataatgtcagattctcagcttataggactgccatgaaactccgaagactgcagaaggccctttgcttggatctcttgagcctgtcagctgcatgtgatgccttggaccagcacaacctcaagcaaaatgaccagcccatggatatcctgcagattattaattgtttgaccactatttatgaccgcctggagcaagagcacaacaatttggtcaacgtccctctctgcgtggatatgtgtctgaactggctgctgaatgtttatgatacgggacgaacagggaggatccgtgtcctgtcttttaaaactggcatcatttccctgtgtaaagcacatttggaagacaagtacagataccttttcaagcaagtggcaagttcaacaggattttgtgaccagcgcaggctgggcctccttctgcatgattctatccaaattccaagacagttgggtgaagttgcatcctttgggggcagtaacattgagccaagtgtccggagctgcttccaatttgctaataataagccagagatcgaagcggccctcttcctagactggatgagactggaaccccagtccatggtgtggctgcccgtcctgcacagagtggctgctgcagaaactgccaagcatcaggccaaatgtaacatctgcaaagagtgtccaatcattggattcaggtacaggagtctaaagcactttaattatgacatctgccaaagctgctttttttctggtcgagttgcaaaaggccataaaatgcactatcccatggtggaatattgcactccgactacatcaggagaagatgttcgagactttgccaaggtactaaaaaacaaatttcgaaccaaaaggtattttgcgaagcatccccgaatgggctacctgccagtgcagactgtcttagagggggacaacatggaaactcccgttactctgatcaacttctggccagtagattctgcgcctgcctcgtcccctcagctttcacacgatgatactcattcacgcattgaacattatgctagcaggctagcagaaatggaaaacagcaatggatcttatctaaatgatagcatctctcctaatgagagcatagatgatgaacatttgttaatccagcattactgccaaagtttgaaccaggactcccccctgagccagcctcgtagtcctgcccagatcttgatttccttagagagtgaggaaagaggggagctagagagaatcctagcagatcttgaggaagaaaacaggaatctgcaagcagaatatgaccgtctaaagcagcagcacgaacataaaggcctgtccccactgccgtcccctcctgaaatgatgcccacctctccccagagtccccgggatgctgagctcattgctgaggccaagctactgcgtcaacacaaaggccgcctggaagccaggatgcaaatcctggaagaccacaataaacagctggagtcacagttacacaggctaaggcagctgctggagcaaccccaggcagaggccaaagtgaatggcacaacggtgtcctctccttctacctctctacagaggtccgacagcagtcagcctatgctgctccgagtggttggcagtcaaacttcggactccatgggtgaggaagatcttctcagtcctccccaggacacaagcacagggttagaggaggtgatggagcaactcaacaactccttccctagttcaagaggaagaaatacccctggaaagccaatgagagaggacacaatgtaggaagtcttttccacatggcagatgatttgggcagagcgatggagtccttagtatcagtcatgacagatgaagaaggagcagaataaatgttttacaactcctgattcccgcatggtttttataatattcatacaacaaagaggattagacagtaagagtttacaagaaataaatctatatttttgtgaagggtagtggtattatactgtagatttcagtagtttctaagtctgttattgttttgttaacaatggcaggttttacacgtctatgcaattgtacaaaaaagttataagaaaactacatgtaaaatcttgatagctaaataacttgccatttctttatatggaacgcattttgggttgtttaaaaatttataacagttataaagaaagattgtaaactaaagtgtgctttataaaaaaaagttgtttataaaaacccctaaaaacaaaacaaacacacacacacacacatacacacacacacacaaaactttgaggcagcgcattgttttgcatccttttggcgtgatatccatatgaaattcatggctttttctttttttgcatattaaagataagacttcctctaccaccacaccaaatgactactacacactgctcatttgagaactgtcagctgagtggggcaggcttgagttttcatttcatatatctatatgtctataagtatataaatactatagttatatagataaagagatacgaatttctatagactgactttttccattttttaaatgttcatgtcacatcctaatagaaagaaattacttctagtcagtcatccaggcttacctgcttggtctagaatggatttttcccggagccggaagccaggaggaaactacaccacactaaaacattgtctacagctccagatgtttctcattttaaacaactttccactgacaacgaaagtaaagtaaagtattggatttttttaaagggaacatgtgaatgaatacacaggacttattatatcagagtgagtaatcggttggttggttgattgattgattgattgatacattcagcttcctgctgctagcaatgccacgatttagatttaatgatgcttcagtggaaatcaatcagaaggtattctgaccttgtgaacatcagaaggtattttttaactcccaagcagtagcaggacgatgatagggctggagggctatggattcccagcccatccctgtgaaggagtaggccactctttaagtgaaggattggatgattgttcataatacataaagttctctgtaattacaactaaattattatgccctcttctcacagtcaaaaggaactgggtggtttggtttttgttgcttttttagatttattgtcccatgtgggatgagtttttaaatgccacaagacataatttaaaataaataaactttgggaaaaggtgtaaaacagtagccccatcacatttgtgatactgacaggtatcaacccagaagcccatgaactgtgtttccatcctttgcatttctctgcgagtagttccacacaggtttgtaagtaagtaagaaagaaggcaaattgattcaaatgttacaaaaaaacccttcttggtggattagacaggttaaatatataaacaaacaaacaaaaattgctcaaaaaagaggagaaaagctcaagaggaaaagctaaggactggtaggaaaaagctttactctttcatgccattttatttctttttgatttttaaatcattcattcaatagataccaccgtgtgacctataattttgcaaatctgttacctctgacatcaagtgtaattagcttttggagagtgggctgacatcaagtgtaattagcttttggagagtgggttttgtccattattaataattaattaattaacatcaaacacggcttctcatgctatttctacctcactttggttttggggtgttcctgataattgtgcacacctgagttcacagcttcaccacttgtccattgcgttattttctttttcctttataattctttctttttccttcataattttcaaaagaaaacccaaagctctaaggtaacaaattaccaaattacatgaagatttggtttttgtcttgcatttttttcctttatgtgacgctggaccttttctttacccaaggatttttaaaactcagatttaaaacaaggggttactttacatcctactaagaagtttaagtaagtaagtttcattctaaaatcagaggtaaatagagtgcataaataattttgttttaatctttttgtttttcttttagacacattagctctggagtgagtctgtcataatatttgaacaaaaattgagagctttattgctgcattttaagcataattaatttggacattatttcgtgttgtgttctttataaccaccaagtattaaactgtaaatcataatgtaactgaagcataaacatcacatggcatgttttgtcattgttttcaggtactgagttcttacttgagtatcataatatattgtgttttaacaccaacactgtaacatttacgaattatttttttaaacttcagttttactgcattttcacaacatatcagacttcaccaaatatatgccttactattgtattatagtactgctttactgtgtatctcaataaagcacgcagttatgttac

SEQ ID NO: 389 - protein, 3681 aa, Homo sapiens
MSEVSSDEREDVQKKTFTKWVNAQFSKFGKQHIENLFSDLQDGRRLLDLLEGLTGQKLPKEKGSTRVHALNNVNKALRVLQNNNVDLVNIGSTDIVDGNHKLTLGLIWNIILHWQVKNVMKNIMAGLQQTNSEKILLSWVRQSTRNYPQVNVINFTTSWSDGLALNALIHSHRPDLFDWNSVVCQQSATQRLEHAFNIARYQLGIEKLLDPEDVDTTYPDKKSILMYITSLFQVLPQQVSIEAIQEVEMLPRPPKVTKEEHFQLHHQMHYSQQITVSLAQGYERTSSPKPRFKSYAYTQAAYVTTSDPTRSPFPSQHLEAPEDKSFGSSLMESEVNLDRYQTALEEVLSWLLSAEDTLQAQGEISNDVEVVKDQFHTHEGYMMDLTAHQGRVGNILQLGSKLIGTGKLSEDEETEVQEQMNLLNSRWECLRVASMEKQSNLHRVLMDLQNQKLKELNDWLTKTEERTRKMEEEPLGPDLEDLKRQVQQHKVLQEDLEQEQVRVNSLTHMVVVVDESSGDHATAALEEQLKVLGDRWANICRWTEDRWVLLQDILLKWQRLTEEQCLFSAWLSEKEDAVNKIHTTGFKDQNEMLSSLQKLAVLKADLEKKKQSMGKLYSLKQDLLSTLKNKSVTQKTEAWLDNFARCWDNLVQKLEKSTAQISQAVTTTQPSLTQTTVMETVTTVTTREQILVKHAQEELPPPPPQKKRQITVDSEIRKRLDVDITELHSWITRSEAVLQSPEFAIFRKEGNFSDLKEKVNAIEREKAEKFRKLQDASRSAQALVEQMVNEGVNADSIKQASEQLNSRWIEFCQLLSERLNWLEYQNNIIAFYNQLQQLEQMTTTAENWLKIQPTTPSEPTAIKSQLKICKDEVNRLSGLQPQIERLKIQSIALKEKGQGPMFLDADFVAFTNHFKQVFSDVQAREKELQTIFDTLPPMRYQETMSAIRTWVQQSETKLSIPQLSVTDYEIMEQRLGELQALQSSLQEQQSGLYYLSTTVKEMSKKAPSEISRKYQSEFEEIEGRWKKLSSQLVEHCQKLEEQMNKLRKIQNHIQTLKKWMAEVDVFLKEEWPALGDSEILKKQLKQCRLLVSDIQTIQPSLNSVNEGGQKIKNEAEPEFASRLETELKELNTQWDHMCQQVYARKEALKGGLEKTVSLQKDLSEMHEWMTQAEEEYLERDFEYKTPDELQKAVEEMKRAKEEAQQKEAKVKLLTESVNSVIAQAPPVAQEALKKELETLTTNYQWLCTRLNGKCKTLEEVWACWHELLSYLEKANKWLNEVEFKLKTTENIPGGAEEISEVLDSLENLMRHSEDNPNQIRILAQTLTDGGVMDELINEELETFNSRWRELHEEAVRRQKLLEQSIQSAQETEKSLHLIQESLTFIDKQLAAYIADKVDAAQMPQEAQKIQSDLTSHEISLEEMKKHNQGKEAAQRVLSQIDVAQKKLQDVSMKFRLFQKPANFEQRLQESKMILDEVKMHLPALETKSVEQEVVQSQLNHCVNLYKSLSEVKSEVEMVIKTGRQIVQKKQTENPKELDERVTALKLHYNELGAKVTERKQQLEKCLKLSRKMRKEMNVLTEWLAATDMELTKRSAVEGMPSNLDSEVAWGKATQKEIEKQKVHLKSITEVGEALKTVLGKKETLVEDKLSLLNSNWIAVTSRAEEWLNLLLEYQKHMETFDQNVDHITKWIIQADTLLDESEKKKPQQKEDVLKRLKAELNDIRPKVDSTRDQAANLMANRGDHCRKLVEPQISELNHRFAAISHRIKTGKASIPLKELEQFNSDIQKLLEPLEAEIQQGVNLKEEDFNKDMNEDNEGTVKELLQRGDNLQQRITDERKREEIKIKQQLLQTKHNALKDLRSQRRKKALEISHQWYQYKRQADDLLKCLDDIEKKLASLPEPRDERKIKEIDRELQKKKEELNAVRRQAEGLSEDGAAMAVEPTQIQLSKRWREIESKFAQFRRLNFAQIHTVREETMMVMTEDMPLEISYVPSTYLTEITHVSQALLEVEQLLNAPDLCAKDFEDLFKQEESLKNIKDSLQQSSGRIDIIHSKKTAALQSATPVERVKLQEALSQLDFQWEKVNKMYKDRQGRFDRSVEKWRRFHYDIKIFNQWLTEAEQFLRKTQIPENWEHAKYKWYLKELQDGIGQRQTVVRTLNATGEEIIQQSSKTDASILQEKLGSLNLRWQEVCKQLSDRKKRLEEQKNILSEFQRDLNEFVLWLEEADNIASIPLEPGKEQQLKEKLEQVKLLVEELPLRQGILKQLNETGGPVLVSAPISPEEQDKLENKLKQTNLQWIKVSRALPEKQGEIEAQIKDLGQLEKKLEDLEEQLNHLLLWLSPIRNQLEIYNQPNQEGPFDVQETEIAVQAKQPDVEEILSKGQHLYKEKPATQPVKRKLEDLSSEWKAVNRLLQELRAKQPDLAPGLTTIGASPTQTVTLVTQPVVTKETAISKLEMPSSLMLEVPALADFNRAWTELTDWLSLLDQVIKSQRVMVGDLEDINEMIIKQKATMQDLEQRRPQLEELITAAQNLKNKTSNQEARTIITDRIERIQNQWDEVQEHLQNRRQQLNEMLKDSTQWLEAKEEAEQVLGQARAKLESWKEGPYTVDAIQKKITETKQLAKDLRQWQTNVDVANDLALKLLRDYSADDTRKVHMITENINASWRSIHKRVSEREAALEETHRLLQQFPLDLEKFLAWLTEAETTANVLQDATRKERLLEDSKGVKELMKQWQDLQGEIEAHTDVYHNLDENSQKILRSLEGSDDAVLLQRRLDNMNFKWSELRKKSLNIRSHLEASSDQWKRLHLSLQELLVWLQLKDDELSRQAPIGGDFPAVQKQNDVHRAFKRELKTKEPVIMSTLETVRIFLTEQPLEGLEKLYQEPRELPPEERAQNVTRLLRKQAEEVNTEWEKLNLHSADWQRKIDETLERLQELQEATDELDLKLRQAEVIKGSWQPVGDLLIDSLQDHLEKVKALRGEIAPLKENVSHVNDLARQLTTLGIQLSPYNLSTLEDLNTRWKLLQVAVEDRVRQLHEAHRDFGPASQHFLSTSVQGPWERAISPNKVPYYINHETQTTCWDHPKMTELYQSLADLNNVRFSAYRTAMKLRRLQKALCLDLLSLSAACDALDQHNLKQNDQPMDILQIINCLTTIYDRLEQEHNNLVNVPLCVDMCLNWLLNVYDTGRTGRIRVLSFKTGIISLCKAHLEDKYRYLFKQVASSTGFCDQRRLGLLLHDSIQIPRQLGEVASFGGSNIEPSVRSCFQFANNKPEIEAALFLDWMRLEPQSMVWLPVLHRVAAAETAKHQAKCNICKECPIIGFRYRSLKHFNYDICQSCFFSGRVAKGHKMHYPMVEYCTPTTSGEDVRDFAKVLKNKFRTKRYFAKHPRMGYLPVQTVLEGDNMETPVTLINFWPVDSAPASSPQLSHDDTHSRIEHYASRLAEMENSNGSYLNDSISPNESIDDEHLLIQHYCQSLNQDSPLSQPRSPAQILISLESEERGELERILADLEEENRNLQAEYDRLKQQHEHKGLSPLPSPPEMMPTSPQSPRDAELIAEAKLLRQHKGRLEARMQILEDHNKQLESQLHRLRQLLEQPQAEAKVNGTTVSSPSTSLQRSDSSQPMLLRVVGSQTSDSMGEEDLLSPPQDTSTGLEEVMEQLNNSFPSSRGRNTPGKPMREDTM

SEQ ID NO: 390 - DNA, 9771 bp, Homo sapiens
taatgagatcaggaggaacattcgacctgagaaagacagattgcaatgactgagatgattttgctaattttttttccagcctatttccttaatgctgtaaggaggcaaaagttgcttgaacagagcatccagtctgcccaggagactgaaaaatccttacacttaatccaggagtccctcacattcattgacaagcagttggcagcttatattgcagacaaggtggacgcagctcaaatgcctcaggaagcccagaaaatccaatctgatttgacaagtcatgagatcagtttagaagaaatgaagaaacataatcaggggaaggaggctgcccaaagagtcctgtctcagattgatgttgcacagaaaaaattacaagatgtctccatgaagtttcgattattccagaaaccagccaattttgagcagcgtctacaagaaagtaagatgattttagatgaagtgaagatgcacttgcctgcattggaaacaaagagtgtggaacaggaagtagtacagtcacagctaaatcattgtgtgaacttgtataaaagtctgagtgaagtgaagtctgaagtggaaatggtgataaagactggacgtcagattgtacagaaaaagcagacggaaaatcccaaagaacttgatgaaagagtaacagctttgaaattgcattataatgagctgggagcaaaggtaacagaaagaaagcaacagttggagaaatgcttgaaattgtcccgtaagatgcgaaaggaaatgaatgtcttgacagaatggctggcagctacagatatggaattgacaaagagatcagcagttgaaggaatgcctagtaatttggattctgaagttgcctggggaaaggctactcaaaaagagattgagaaacagaaggtgcacctgaagagtatcacagaggtaggagaggccttgaaaacagttttgggcaagaaggagacgttggtggaagataaactcagtcttctgaatagtaactggatagctgtcacctcccgagcagaagagtggttaaatcttttgttggaataccagaaacacatggaaacttttgaccagaatgtggaccacatcacaaagtggatcattcaggctgacacacttttggatgaatcagagaaaaagaaaccccagcaaaaagaagacgtgcttaagcgtttaaaggcagaactgaatgacatacgcccaaaggtggactctacacgtgaccaagcagcaaacttgatggcaaaccgcggtgaccactgcaggaaattagtagagccccaaatctcagagctcaaccatcgatttgcagccatttcacacagaattaagactggaaaggcctccattcctttgaaggaattggagcagtttaactcagatatacaaaaattgcttgaaccactggaggctgaaattcagcagggggtgaatctgaaagaggaagacttcaataaagatatgaatgaagacaatgagggtactgtaaaagaattgttgcaaagaggagacaacttacaacaaagaatcacagatgagagaaagcgagaggaaataaagataaaacagcagctgttacagacaaaacataatgctctcaaggatttgaggtctcaaagaagaaaaaaggctctagaaatttctcatcagtggtatcagtacaagaggcaggctgatgatctcctgaaatgcttggatgacattgaaaaaaaattagccagcctacctgagcccagagatgaaaggaaaataaaggaaattgatcgggaattgcagaagaagaaagaggagctgaatgcagtgcgtaggcaagctgagggcttgtctgaggatggggccgcaatggcagtggagccaactcagatccagctcagcaagcgctggcgggaaattgagagcaaatttgctcagtttcgaagactcaactttgcacaaattcacactgtccgtgaagaaacgatgatggtgatgactgaagacatgcctttggaaatttcttatgtgccttctacttatttgactgaaatcactcatgtctcacaagccctattagaagtggaacaacttctcaatgctcctgacctctgtgctaaggactttgaagatctctttaagcaagaggagtctctgaagaatataaaagatagtctacaacaaagctcaggtcggattgacattattcatagcaagaagacagcagcattgcaaagtgcaacgcctgtggaaagggtgaagctacaggaagctctctcccagcttgatttccaatgggaaaaagttaacaaaatgtacaaggaccgacaagggcgatttgacagatctgttgagaaatggcggcgttttcattatgatataaagatatttaatcagtggctaacagaagctgaacagtttctcagaaagacacaaattcctgagaattgggaacatgctaaatacaaatggtatcttaaggaactccaggatggcattgggcagcggcaaactgttgtcagaacattgaatgcaactggggaagaaataattcagcaatcctcaaaaacagatgccagtattctacaggaaaaattgggaagcctgaatctgcggtggcaggaggtctgcaaacagctgtcagacagaaaaaagaggctagaagaacaaaagaatatcttgtcagaatttcaaagagatttaaatgaatttgttttatggttggaggaagcagataacattgctagtatcccacttgaacctggaaaagagcagcaactaaaagaaaagcttgagcaagtcaagttactggtggaagagttgcccctgcgccagggaattctcaaacaattaaatgaaactggaggacccgtgcttgtaagtgctcccataagcccagaagagcaagataaacttgaaaataagctcaagcagacaaatctccagtggataaaggtttccagagctttacctgagaaacaaggagaaattgaagctcaaataaaagaccttgggcagcttgaaaaaaagcttgaagaccttgaagagcagttaaatcatctgctgctgtggttatctcctattaggaatcagttggaaatttataaccaaccaaaccaagaaggaccatttgacgttcaggaaactgaaatagcagttcaagctaaacaaccggatgtggaagagattttgtctaaagggcagcatttgtacaaggaaaaaccagccactcagccagtgaagaggaagttagaagatctgagctctgagtggaaggcggtaaaccgtttacttcaagagctgagggcaaagcagcctgacctagctcctggactgaccactattggagcctctcctactcagactgttactctggtgacacaacctgtggttactaaggaaactgccatctccaaactagaaatgccatcttccttgatgttggaggtacctgctctggcagatttcaaccgggcttggacagaacttaccgactggctttctctgcttgatcaagttataaaatcacagagggtgatggtgggtgaccttgaggatatcaacgagatgatcatcaagcagaaggcaacaatgcaggatttggaacagaggcgtccccagttggaagaactcattaccgctgcccaaaatttgaaaaacaagaccagcaatcaagaggctagaacaatcattacggatcgaattgaaagaattcagaatcagtgggatgaagtacaagaacaccttcagaaccggaggcaacagttgaatgaaatgttaaaggattcaacacaatggctggaagctaaggaagaagctgagcaggtcttaggacaggccagagccaagcttgagtcatggaaggagggtccctatacagtagatgcaatccaaaagaaaatcacagaaaccaagcagttggccaaagacctccgccagtggcagacaaatgtagatgtggcaaatgacttggccctgaaacttctccgggattattctgcagatgataccagaaaagtccacatgataacagagaatatcaatgcctcttggagaagcattcataaaagggtgagtgagcgagaggctgctttggaagaaactcatagattactgcaacagttccccctggacctggaaaagtttcttgcctggcttacagaagctgaaacaactgccaatgtcctacaggatgctacccgtaaggaaaggctcctagaagactccaagggagtaaaagagctgatgaaacaatggcaagacctccaaggtgaaattgaagctcacacagatgtttatcacaacctggatgaaaacagccaaaaaatcctgagatccctggaaggttccgatgatgcagtcctgttacaaagacgtttggataacatgaacttcaagtggagtgaacttcggaaaaagtctctcaacattaggtcccatttggaagccagttctgaccagtggaagcgtctgcacctttctctgcaggaacttctggtgtggctacagctgaaagatgatgaattaagccggcaggcacctattggaggcgactttccagcagttcagaagcagaacgatgtacatagggccttcaagagggaattgaaaactaaagaacctgtaatcatgagtactcttgagactgtacgaatatttctgacagagcagcctttggaaggactagagaaactctaccaggagcccagagagctgcctcctgaggagagagcccagaatgtcactcggcttctacgaaagcaggctgaggaggtcaatactgagtgggaaaaattgaacctgcactccgctgactggcagagaaaaatagatgagacccttgaaagactccaggaacttcaagaggccacggatgagctggacctcaagctgcgccaagctgaggtgatcaagggatcctggcagcccgtgggcgatctcctcattgactctctccaagatcacctcgagaaagtcaaggcacttcgaggagaaattgcgcctctgaaagagaacgtgagccacgtcaatgaccttgctcgccagcttaccactttgggcattcagctctcaccgtataacctcagcactctggaagacctgaacaccagatggaagcttctgcaggtggccgtcgaggaccgagtcaggcagctgcatgaagcccacagggactttggtccagcatctcagcactttctttccacgtctgtccagggtccctgggagagagccatctcgccaaacaaagtgccctactatatcaaccacgagactcaaacaacttgctgggaccatcccaaaatgacagagctctaccagtctttagctgacctgaataatgtcagattctcagcttataggactgccatgaaactccgaagactgcagaaggccctttgcttggatctcttgagcctgtcagctgcatgtgatgccttggaccagcacaacctcaagcaaaatgaccagcccatggatatcctgcagattattaattgtttgaccactatttatgaccgcctggagcaagagcacaacaatttggtcaacgtccctctctgcgtggatatgtgtctgaactggctgctgaatgtttatgatacgggacgaacagggaggatccgtgtcctgtcttttaaaactggcatcatttccctgtgtaaagcacatttggaagacaagtacagataccttttcaagcaagtggcaagttcaacaggattttgtgaccagcgcaggctgggcctccttctgcatgattctatccaaattccaagacagttgggtgaagttgcatcctttgggggcagtaacattgagccaagtgtccggagctgcttccaatttgctaataataagccagagatcgaagcggccctcttcctagactggatgagactggaaccccagtccatggtgtggctgcccgtcctgcacagagtggctgctgcagaaactgccaagcatcaggccaaatgtaacatctgcaaagagtgtccaatcattggattcaggtacaggagtctaaagcactttaattatgacatctgccaaagctgctttttttctggtcgagttgcaaaaggccataaaatgcactatcccatggtggaatattgcactccgactacatcaggagaagatgttcgagactttgccaaggtactaaaaaacaaatttcgaaccaaaaggtattttgcgaagcatccccgaatgggctacctgccagtgcagactgtcttagagggggacaacatggaaactcccgttactctgatcaacttctggccagtagattctgcgcctgcctcgtcccctcagctttcacacgatgatactcattcacgcattgaacattatgctagcaggctagcagaaatggaaaacagcaatggatcttatctaaatgatagcatctctcctaatgagagcatagatgatgaacatttgttaatccagcattactgccaaagtttgaaccaggactcccccctgagccagcctcgtagtcctgcccagatcttgatttccttagagagtgaggaaagaggggagctagagagaatcctagcagatcttgaggaagaaaacaggaatctgcaagcagaatatgaccgtctaaagcagcagcacgaacataaaggcctgtccccactgccgtcccctcctgaaatgatgcccacctctccccagagtccccgggatgctgagctcattgctgaggccaagctactgcgtcaacacaaaggccgcctggaagccaggatgcaaatcctggaagaccacaataaacagctggagtcacagttacacaggctaaggcagctgctggagcaaccccaggcagaggccaaagtgaatggcacaacggtgtcctctccttctacctctctacagaggtccgacagcagtcagcctatgctgctccgagtggttggcagtcaaacttcggactccatgggtgaggaagatcttctcagtcctccccaggacacaagcacagggttagaggaggtgatggagcaactcaacaactccttccctagttcaagaggaagaaatacccctggaaagccaatgagagaggacacaatgtaggaagtcttttccacatggcagatgatttgggcagagcgatggagtccttagtatcagtcatgacagatgaagaaggagcagaataaatgttttacaactcctgattcccgcatggtttttataatattcatacaacaaagaggattagacagtaagagtttacaagaaataaatctatatttttgtgaagggtagtggtattatactgtagatttcagtagtttctaagtctgttattgttttgttaacaatggcaggttttacacgtctatgcaattgtacaaaaaagttataagaaaactacatgtaaaatcttgatagctaaataacttgccatttctttatatggaacgcattttgggttgtttaaaaatttataacagttataaagaaagattgtaaactaaagtgtgctttataaaaaaaagttgtttataaaaacccctaaaaacaaaacaaacacacacacacacacatacacacacacacacaaaactttgaggcagcgcattgttttgcatccttttggcgtgatatccatatgaaattcatggctttttctttttttgcatattaaagataagacttcctctaccaccacaccaaatgactactacacactgctcatttgagaactgtcagctgagtggggcaggcttgagttttcatttcatatatctatatgtctataagtatataaatactatagttatatagataaagagatacgaatttctatagactgactttttccattttttaaatgttcatgtcacatcctaatagaaagaaattacttctagtcagtcatccaggcttacctgcttggtctagaatggatttttcccggagccggaagccaggaggaaactacaccacactaaaacattgtctacagctccagatgtttctcattttaaacaactttccactgacaacgaaagtaaagtaaagtattggatttttttaaagggaacatgtgaatgaatacacaggacttattatatcagagtgagtaatcggttggttggttgattgattgattgattgatacattcagcttcctgctgctagcaatgccacgatttagatttaatgatgcttcagtggaaatcaatcagaaggtattctgaccttgtgaacatcagaaggtattttttaactcccaagcagtagcaggacgatgatagggctggagggctatggattcccagcccatccctgtgaaggagtaggccactctttaagtgaaggattggatgattgttcataatacataaagttctctgtaattacaactaaattattatgccctcttctcacagtcaaaaggaactgggtggtttggtttttgttgcttttttagatttattgtcccatgtgggatgagtttttaaatgccacaagacataatttaaaataaataaactttgggaaaaggtgtaaaacagtagccccatcacatttgtgatactgacaggtatcaacccagaagcccatgaactgtgtttccatcctttgcatttctctgcgagtagttccacacaggtttgtaagtaagtaagaaagaaggcaaattgattcaaatgttacaaaaaaacccttcttggtggattagacaggttaaatatataaacaaacaaacaaaaattgctcaaaaaagaggagaaaagctcaagaggaaaagctaaggactggtaggaaaaagctttactctttcatgccattttatttctttttgatttttaaatcattcattcaatagataccaccgtgtgacctataattttgcaaatctgttacctctgacatcaagtgtaattagcttttggagagtgggctgacatcaagtgtaattagcttttggagagtgggttttgtccattattaataattaattaattaacatcaaacacggcttctcatgctatttctacctcactttggttttggggtgttcctgataattgtgcacacctgagttcacagcttcaccacttgtccattgcgttattttctttttcctttataattctttctttttccttcataattttcaaaagaaaacccaaagctctaaggtaacaaattaccaaattacatgaagatttggtttttgtcttgcatttttttcctttatgtgacgctggaccttttctttacccaaggatttttaaaactcagatttaaaacaaggggttactttacatcctactaagaagtttaagtaagtaagtttcattctaaaatcagaggtaaatagagtgcataaataattttgttttaatctttttgtttttcttttagacacattagctctggagtgagtctgtcataatatttgaacaaaaattgagagctttattgctgcattttaagcataattaatttggacattatttcgtgttgtgttctttataaccaccaagtattaaactgtaaatcataatgtaactgaagcataaacatcacatggcatgttttgtcattgttttcaggtactgagttcttacttgagtatcataatatattgtgttttaacaccaacactgtaacatttacgaattatttttttaaacttcagttttactgcattttcacaacatatcagacttcaccaaatatatgccttactattgtattatagtactgctttactgtgtatctcaataaagcacgcagttatgttac

SEQ ID NO: 391 - protein, 2344 aa, Homo sapiens
MTEMILLIFFPAYFLNAVRRQKLLEQSIQSAQETEKSLHLIQESLTFIDKQLAAYIADKVDAAQMPQEAQKIQSDLTSHEISLEEMKKHNQGKEAAQRVLSQIDVAQKKLQDVSMKFRLFQKPANFEQRLQESKMILDEVKMHLPALETKSVEQEVVQSQLNHCVNLYKSLSEVKSEVEMVIKTGRQIVQKKQTENPKELDERVTALKLHYNELGAKVTERKQQLEKCLKLSRKMRKEMNVLTEWLAATDMELTKRSAVEGMPSNLDSEVAWGKATQKEIEKQKVHLKSITEVGEALKTVLGKKETLVEDKLSLLNSNWIAVTSRAEEWLNLLLEYQKHMETFDQNVDHITKWIIQADTLLDESEKKKPQQKEDVLKRLKAELNDIRPKVDSTRDQAANLMANRGDHCRKLVEPQISELNHRFAAISHRIKTGKASIPLKELEQFNSDIQKLLEPLEAEIQQGVNLKEEDFNKDMNEDNEGTVKELLQRGDNLQQRITDERKREEIKIKQQLLQTKHNALKDLRSQRRKKALEISHQWYQYKRQADDLLKCLDDIEKKLASLPEPRDERKIKEIDRELQKKKEELNAVRRQAEGLSEDGAAMAVEPTQIQLSKRWREIESKFAQFRRLNFAQIHTVREETMMVMTEDMPLEISYVPSTYLTEITHVSQALLEVEQLLNAPDLCAKDFEDLFKQEESLKNIKDSLQQSSGRIDIIHSKKTAALQSATPVERVKLQEALSQLDFQWEKVNKMYKDRQGRFDRSVEKWRRFHYDIKIFNQWLTEAEQFLRKTQIPENWEHAKYKWYLKELQDGIGQRQTVVRTLNATGEEIIQQSSKTDASILQEKLGSLNLRWQEVCKQLSDRKKRLEEQKNILSEFQRDLNEFVLWLEEADNIASIPLEPGKEQQLKEKLEQVKLLVEELPLRQGILKQLNETGGPVLVSAPISPEEQDKLENKLKQTNLQWIKVSRALPEKQGEIEAQIKDLGQLEKKLEDLEEQLNHLLLWLSPIRNQLEIYNQPNQEGPFDVQETEIAVQAKQPDVEEILSKGQHLYKEKPATQPVKRKLEDLSSEWKAVNRLLQELRAKQPDLAPGLTTIGASPTQTVTLVTQPVVTKETAISKLEMPSSLMLEVPALADFNRAWTELTDWLSLLDQVIKSQRVMVGDLEDINEMIIKQKATMQDLEQRRPQLEELITAAQNLKNKTSNQEARTIITDRIERIQNQWDEVQEHLQNRRQQLNEMLKDSTQWLEAKEEAEQVLGQARAKLESWKEGPYTVDAIQKKITETKQLAKDLRQWQTNVDVANDLALKLLRDYSADDTRKVHMITENINASWRSIHKRVSEREAALEETHRLLQQFPLDLEKFLAWLTEAETTANVLQDATRKERLLEDSKGVKELMKQWQDLQGEIEAHTDVYHNLDENSQKILRSLEGSDDAVLLQRRLDNMNFKWSELRKKSLNIRSHLEASSDQWKRLHLSLQELLVWLQLKDDELSRQAPIGGDFPAVQKQNDVHRAFKRELKTKEPVIMSTLETVRIFLTEQPLEGLEKLYQEPRELPPEERAQNVTRLLRKQAEEVNTEWEKLNLHSADWQRKIDETLERLQELQEATDELDLKLRQAEVIKGSWQPVGDLLIDSLQDHLEKVKALRGEIAPLKENVSHVNDLARQLTTLGIQLSPYNLSTLEDLNTRWKLLQVAVEDRVRQLHEAHRDFGPASQHFLSTSVQGPWERAISPNKVPYYINHETQTTCWDHPKMTELYQSLADLNNVRFSAYRTAMKLRRLQKALCLDLLSLSAACDALDQHNLKQNDQPMDILQIINCLTTIYDRLEQEHNNLVNVPLCVDMCLNWLLNVYDTGRTGRIRVLSFKTGIISLCKAHLEDKYRYLFKQVASSTGFCDQRRLGLLLHDSIQIPRQLGEVASFGGSNIEPSVRSCFQFANNKPEIEAALFLDWMRLEPQSMVWLPVLHRVAAAETAKHQAKCNICKECPIIGFRYRSLKHFNYDICQSCFFSGRVAKGHKMHYPMVEYCTPTTSGEDVRDFAKVLKNKFRTKRYFAKHPRMGYLPVQTVLEGDNMETPVTLINFWPVDSAPASSPQLSHDDTHSRIEHYASRLAEMENSNGSYLNDSISPNESIDDEHLLIQHYCQSLNQDSPLSQPRSPAQILISLESEERGELERILADLEEENRNLQAEYDRLKQQHEHKGLSPLPSPPEMMPTSPQSPRDAELIAEAKLLRQHKGRLEARMQILEDHNKQLESQLHRLRQLLEQPQAEAKVNGTTVSSPSTSLQRSDSSQPMLLRVVGSQTSDSMGEEDLLSPPQDTSTGLEEVMEQLNNSFPSSRGRNTPGKPMREDTM

SEQ ID NO: 392 - DNA, 9914 bp, Homo sapiens
taatgagatcaggaggaacattcgacctgagaaagacagattgcaatgactgagatgattttgctaattttttttccagcctatttccttaatgtacgtgatattgtgattgattttcatgcagagatccctgatcctatagttttgtttgctatttatttttctccttcacattttttttctatcaacagagctgaatgagtgccaggaagctgcgaaatctgtcttacaaaaaggctgtaaggaggcaaaagttgcttgaacagagcatccagtctgcccaggagactgaaaaatccttacacttaatccaggagtccctcacattcattgacaagcagttggcagcttatattgcagacaaggtggacgcagctcaaatgcctcaggaagcccagaaaatccaatctgatttgacaagtcatgagatcagtttagaagaaatgaagaaacataatcaggggaaggaggctgcccaaagagtcctgtctcagattgatgttgcacagaaaaaattacaagatgtctccatgaagtttcgattattccagaaaccagccaattttgagcagcgtctacaagaaagtaagatgattttagatgaagtgaagatgcacttgcctgcattggaaacaaagagtgtggaacaggaagtagtacagtcacagctaaatcattgtgtgaacttgtataaaagtctgagtgaagtgaagtctgaagtggaaatggtgataaagactggacgtcagattgtacagaaaaagcagacggaaaatcccaaagaacttgatgaaagagtaacagctttgaaattgcattataatgagctgggagcaaaggtaacagaaagaaagcaacagttggagaaatgcttgaaattgtcccgtaagatgcgaaaggaaatgaatgtcttgacagaatggctggcagctacagatatggaattgacaaagagatcagcagttgaaggaatgcctagtaatttggattctgaagttgcctggggaaaggctactcaaaaagagattgagaaacagaaggtgcacctgaagagtatcacagaggtaggagaggccttgaaaacagttttgggcaagaaggagacgttggtggaagataaactcagtcttctgaatagtaactggatagctgtcacctcccgagcagaagagtggttaaatcttttgttggaataccagaaacacatggaaacttttgaccagaatgtggaccacatcacaaagtggatcattcaggctgacacacttttggatgaatcagagaaaaagaaaccccagcaaaaagaagacgtgcttaagcgtttaaaggcagaactgaatgacatacgcccaaaggtggactctacacgtgaccaagcagcaaacttgatggcaaaccgcggtgaccactgcaggaaattagtagagccccaaatctcagagctcaaccatcgatttgcagccatttcacacagaattaagactggaaaggcctccattcctttgaaggaattggagcagtttaactcagatatacaaaaattgcttgaaccactggaggctgaaattcagcagggggtgaatctgaaagaggaagacttcaataaagatatgaatgaagacaatgagggtactgtaaaagaattgttgcaaagaggagacaacttacaacaaagaatcacagatgagagaaagcgagaggaaataaagataaaacagcagctgttacagacaaaacataatgctctcaaggatttgaggtctcaaagaagaaaaaaggctctagaaatttctcatcagtggtatcagtacaagaggcaggctgatgatctcctgaaatgcttggatgacattgaaaaaaaattagccagcctacctgagcccagagatgaaaggaaaataaaggaaattgatcgggaattgcagaagaagaaagaggagctgaatgcagtgcgtaggcaagctgagggcttgtctgaggatggggccgcaatggcagtggagccaactcagatccagctcagcaagcgctggcgggaaattgagagcaaatttgctcagtttcgaagactcaactttgcacaaattcacactgtccgtgaagaaacgatgatggtgatgactgaagacatgcctttggaaatttcttatgtgccttctacttatttgactgaaatcactcatgtctcacaagccctattagaagtggaacaacttctcaatgctcctgacctctgtgctaaggactttgaagatctctttaagcaagaggagtctctgaagaatataaaagatagtctacaacaaagctcaggtcggattgacattattcatagcaagaagacagcagcattgcaaagtgcaacgcctgtggaaagggtgaagctacaggaagctctctcccagcttgatttccaatgggaaaaagttaacaaaatgtacaaggaccgacaagggcgatttgacagatctgttgagaaatggcggcgttttcattatgatataaagatatttaatcagtggctaacagaagctgaacagtttctcagaaagacacaaattcctgagaattgggaacatgctaaatacaaatggtatcttaaggaactccaggatggcattgggcagcggcaaactgttgtcagaacattgaatgcaactggggaagaaataattcagcaatcctcaaaaacagatgccagtattctacaggaaaaattgggaagcctgaatctgcggtggcaggaggtctgcaaacagctgtcagacagaaaaaagaggctagaagaacaaaagaatatcttgtcagaatttcaaagagatttaaatgaatttgttttatggttggaggaagcagataacattgctagtatcccacttgaacctggaaaagagcagcaactaaaagaaaagcttgagcaagtcaagttactggtggaagagttgcccctgcgccagggaattctcaaacaattaaatgaaactggaggacccgtgcttgtaagtgctcccataagcccagaagagcaagataaacttgaaaataagctcaagcagacaaatctccagtggataaaggtttccagagctttacctgagaaacaaggagaaattgaagctcaaataaaagaccttgggcagcttgaaaaaaagcttgaagaccttgaagagcagttaaatcatctgctgctgtggttatctcctattaggaatcagttggaaatttataaccaaccaaaccaagaaggaccatttgacgttcaggaaactgaaatagcagttcaagctaaacaaccggatgtggaagagattttgtctaaagggcagcatttgtacaaggaaaaaccagccactcagccagtgaagaggaagttagaagatctgagctctgagtggaaggcggtaaaccgtttacttcaagagctgagggcaaagcagcctgacctagctcctggactgaccactattggagcctctcctactcagactgttactctggtgacacaacctgtggttactaaggaaactgccatctccaaactagaaatgccatcttccttgatgttggaggtacctgctctggcagatttcaaccgggcttggacagaacttaccgactggctttctctgcttgatcaagttataaaatcacagagggtgatggtgggtgaccttgaggatatcaacgagatgatcatcaagcagaaggcaacaatgcaggatttggaacagaggcgtccccagttggaagaactcattaccgctgcccaaaatttgaaaaacaagaccagcaatcaagaggctagaacaatcattacggatcgaattgaaagaattcagaatcagtgggatgaagtacaagaacaccttcagaaccggaggcaacagttgaatgaaatgttaaaggattcaacacaatggctggaagctaaggaagaagctgagcaggtcttaggacaggccagagccaagcttgagtcatggaaggagggtccctatacagtagatgcaatccaaaagaaaatcacagaaaccaagcagttggccaaagacctccgccagtggcagacaaatgtagatgtggcaaatgacttggccctgaaacttctccgggattattctgcagatgataccagaaaagtccacatgataacagagaatatcaatgcctcttggagaagcattcataaaagggtgagtgagcgagaggctgctttggaagaaactcatagattactgcaacagttccccctggacctggaaaagtttcttgcctggcttacagaagctgaaacaactgccaatgtcctacaggatgctacccgtaaggaaaggctcctagaagactccaagggagtaaaagagctgatgaaacaatggcaagacctccaaggtgaaattgaagctcacacagatgtttatcacaacctggatgaaaacagccaaaaaatcctgagatccctggaaggttccgatgatgcagtcctgttacaaagacgtttggataacatgaacttcaagtggagtgaacttcggaaaaagtctctcaacattaggtcccatttggaagccagttctgaccagtggaagcgtctgcacctttctctgcaggaacttctggtgtggctacagctgaaagatgatgaattaagccggcaggcacctattggaggcgactttccagcagttcagaagcagaacgatgtacatagggccttcaagagggaattgaaaactaaagaacctgtaatcatgagtactcttgagactgtacgaatatttctgacagagcagcctttggaaggactagagaaactctaccaggagcccagagagctgcctcctgaggagagagcccagaatgtcactcggcttctacgaaagcaggctgaggaggtcaatactgagtgggaaaaattgaacctgcactccgctgactggcagagaaaaatagatgagacccttgaaagactccaggaacttcaagaggccacggatgagctggacctcaagctgcgccaagctgaggtgatcaagggatcctggcagcccgtgggcgatctcctcattgactctctccaagatcacctcgagaaagtcaaggcacttcgaggagaaattgcgcctctgaaagagaacgtgagccacgtcaatgaccttgctcgccagcttaccactttgggcattcagctctcaccgtataacctcagcactctggaagacctgaacaccagatggaagcttctgcaggtggccgtcgaggaccgagtcaggcagctgcatgaagcccacagggactttggtccagcatctcagcactttctttccacgtctgtccagggtccctgggagagagccatctcgccaaacaaagtgccctactatatcaaccacgagactcaaacaacttgctgggaccatcccaaaatgacagagctctaccagtctttagctgacctgaataatgtcagattctcagcttataggactgccatgaaactccgaagactgcagaaggccctttgcttggatctcttgagcctgtcagctgcatgtgatgccttggaccagcacaacctcaagcaaaatgaccagcccatggatatcctgcagattattaattgtttgaccactatttatgaccgcctggagcaagagcacaacaatttggtcaacgtccctctctgcgtggatatgtgtctgaactggctgctgaatgtttatgatacgggacgaacagggaggatccgtgtcctgtcttttaaaactggcatcatttccctgtgtaaagcacatttggaagacaagtacagataccttttcaagcaagtggcaagttcaacaggattttgtgaccagcgcaggctgggcctccttctgcatgattctatccaaattccaagacagttgggtgaagttgcatcctttgggggcagtaacattgagccaagtgtccggagctgcttccaatttgctaataataagccagagatcgaagcggccctcttcctagactggatgagactggaaccccagtccatggtgtggctgcccgtcctgcacagagtggctgctgcagaaactgccaagcatcaggccaaatgtaacatctgcaaagagtgtccaatcattggattcaggtacaggagtctaaagcactttaattatgacatctgccaaagctgctttttttctggtcgagttgcaaaaggccataaaatgcactatcccatggtggaatattgcactccgactacatcaggagaagatgttcgagactttgccaaggtactaaaaaacaaatttcgaaccaaaaggtattttgcgaagcatccccgaatgggctacctgccagtgcagactgtcttagagggggacaacatggaaactcccgttactctgatcaacttctggccagtagattctgcgcctgcctcgtcccctcagctttcacacgatgatactcattcacgcattgaacattatgctagcaggctagcagaaatggaaaacagcaatggatcttatctaaatgatagcatctctcctaatgagagcatagatgatgaacatttgttaatccagcattactgccaaagtttgaaccaggactcccccctgagccagcctcgtagtcctgcccagatcttgatttccttagagagtgaggaaagaggggagctagagagaatcctagcagatcttgaggaagaaaacaggaatctgcaagcagaatatgaccgtctaaagcagcagcacgaacataaaggcctgtccccactgccgtcccctcctgaaatgatgcccacctctccccagagtccccgggatgctgagctcattgctgaggccaagctactgcgtcaacacaaaggccgcctggaagccaggatgcaaatcctggaagaccacaataaacagctggagtcacagttacacaggctaaggcagctgctggagcaaccccaggcagaggccaaagtgaatggcacaacggtgtcctctccttctacctctctacagaggtccgacagcagtcagcctatgctgctccgagtggttggcagtcaaacttcggactccatgggtgaggaagatcttctcagtcctccccaggacacaagcacagggttagaggaggtgatggagcaactcaacaactccttccctagttcaagaggaagaaatacccctggaaagccaatgagagaggacacaatgtaggaagtcttttccacatggcagatgatttgggcagagcgatggagtccttagtatcagtcatgacagatgaagaaggagcagaataaatgttttacaactcctgattcccgcatggtttttataatattcatacaacaaagaggattagacagtaagagtttacaagaaataaatctatatttttgtgaagggtagtggtattatactgtagatttcagtagtttctaagtctgttattgttttgttaacaatggcaggttttacacgtctatgcaattgtacaaaaaagttataagaaaactacatgtaaaatcttgatagctaaataacttgccatttctttatatggaacgcattttgggttgtttaaaaatttataacagttataaagaaagattgtaaactaaagtgtgctttataaaaaaaagttgtttataaaaacccctaaaaacaaaacaaacacacacacacacacatacacacacacacacaaaactttgaggcagcgcattgttttgcatccttttggcgtgatatccatatgaaattcatggctttttctttttttgcatattaaagataagacttcctctaccaccacaccaaatgactactacacactgctcatttgagaactgtcagctgagtggggcaggcttgagttttcatttcatatatctatatgtctataagtatataaatactatagttatatagataaagagatacgaatttctatagactgactttttccattttttaaatgttcatgtcacatcctaatagaaagaaattacttctagtcagtcatccaggcttacctgcttggtctagaatggatttttcccggagccggaagccaggaggaaactacaccacactaaaacattgtctacagctccagatgtttctcattttaaacaactttccactgacaacgaaagtaaagtaaagtattggatttttttaaagggaacatgtgaatgaatacacaggacttattatatcagagtgagtaatcggttggttggttgattgattgattgattgatacattcagcttcctgctgctagcaatgccacgatttagatttaatgatgcttcagtggaaatcaatcagaaggtattctgaccttgtgaacatcagaaggtattttttaactcccaagcagtagcaggacgatgatagggctggagggctatggattcccagcccatccctgtgaaggagtaggccactctttaagtgaaggattggatgattgttcataatacataaagttctctgtaattacaactaaattattatgccctcttctcacagtcaaaaggaactgggtggtttggtttttgttgcttttttagatttattgtcccatgtgggatgagtttttaaatgccacaagacataatttaaaataaataaactttgggaaaaggtgtaaaacagtagccccatcacatttgtgatactgacaggtatcaacccagaagcccatgaactgtgtttccatcctttgcatttctctgcgagtagttccacacaggtttgtaagtaagtaagaaagaaggcaaattgattcaaatgttacaaaaaaacccttcttggtggattagacaggttaaatatataaacaaacaaacaaaaattgctcaaaaaagaggagaaaagctcaagaggaaaagctaaggactggtaggaaaaagctttactctttcatgccattttatttctttttgatttttaaatcattcattcaatagataccaccgtgtgacctataattttgcaaatctgttacctctgacatcaagtgtaattagcttttggagagtgggctgacatcaagtgtaattagcttttggagagtgggttttgtccattattaataattaattaattaacatcaaacacggcttctcatgctatttctacctcactttggttttggggtgttcctgataattgtgcacacctgagttcacagcttcaccacttgtccattgcgttattttctttttcctttataattctttctttttccttcataattttcaaaagaaaacccaaagctctaaggtaacaaattaccaaattacatgaagatttggtttttgtcttgcatttttttcctttatgtgacgctggaccttttctttacccaaggatttttaaaactcagatttaaaacaaggggttactttacatcctactaagaagtttaagtaagtaagtttcattctaaaatcagaggtaaatagagtgcataaataattttgttttaatctttttgtttttcttttagacacattagctctggagtgagtctgtcataatatttgaacaaaaattgagagctttattgctgcattttaagcataattaatttggacattatttcgtgttgtgttctttataaccaccaagtattaaactgtaaatcataatgtaactgaagcataaacatcacatggcatgttttgtcattgttttcaggtactgagttcttacttgagtatcataatatattgtgttttaacaccaacactgtaacatttacgaattatttttttaaacttcagttttactgcattttcacaacatatcagacttcaccaaatatatgccttactattgtattatagtactgctttactgtgtatctcaataaagcacgcagttatgttac

SEQ ID NO: 393 - protein, 2341 aa, Homo sapiens
MSARKLRNLSYKKAVRRQKLLEQSIQSAQETEKSLHLIQESLTFIDKQLAAYIADKVDAAQMPQEAQKIQSDLTSHEISLEEMKKHNQGKEAAQRVLSQIDVAQKKLQDVSMKFRLFQKPANFEQRLQESKMILDEVKMHLPALETKSVEQEVVQSQLNHCVNLYKSLSEVKSEVEMVIKTGRQIVQKKQTENPKELDERVTALKLHYNELGAKVTERKQQLEKCLKLSRKMRKEMNVLTEWLAATDMELTKRSAVEGMPSNLDSEVAWGKATQKEIEKQKVHLKSITEVGEALKTVLGKKETLVEDKLSLLNSNWIAVTSRAEEWLNLLLEYQKHMETFDQNVDHITKWIIQADTLLDESEKKKPQQKEDVLKRLKAELNDIRPKVDSTRDQAANLMANRGDHCRKLVEPQISELNHRFAAISHRIKTGKASIPLKELEQFNSDIQKLLEPLEAEIQQGVNLKEEDFNKDMNEDNEGTVKELLQRGDNLQQRITDERKREEIKIKQQLLQTKHNALKDLRSQRRKKALEISHQWYQYKRQADDLLKCLDDIEKKLASLPEPRDERKIKEIDRELQKKKEELNAVRRQAEGLSEDGAAMAVEPTQIQLSKRWREIESKFAQFRRLNFAQIHTVREETMMVMTEDMPLEISYVPSTYLTEITHVSQALLEVEQLLNAPDLCAKDFEDLFKQEESLKNIKDSLQQSSGRIDIIHSKKTAALQSATPVERVKLQEALSQLDFQWEKVNKMYKDRQGRFDRSVEKWRRFHYDIKIFNQWLTEAEQFLRKTQIPENWEHAKYKWYLKELQDGIGQRQTVVRTLNATGEEIIQQSSKTDASILQEKLGSLNLRWQEVCKQLSDRKKRLEEQKNILSEFQRDLNEFVLWLEEADNIASIPLEPGKEQQLKEKLEQVKLLVEELPLRQGILKQLNETGGPVLVSAPISPEEQDKLENKLKQTNLQWIKVSRALPEKQGEIEAQIKDLGQLEKKLEDLEEQLNHLLLWLSPIRNQLEIYNQPNQEGPFDVQETEIAVQAKQPDVEEILSKGQHLYKEKPATQPVKRKLEDLSSEWKAVNRLLQELRAKQPDLAPGLTTIGASPTQTVTLVTQPVVTKETAISKLEMPSSLMLEVPALADFNRAWTELTDWLSLLDQVIKSQRVMVGDLEDINEMIIKQKATMQDLEQRRPQLEELITAAQNLKNKTSNQEARTIITDRIERIQNQWDEVQEHLQNRRQQLNEMLKDSTQWLEAKEEAEQVLGQARAKLESWKEGPYTVDAIQKKITETKQLAKDLRQWQTNVDVANDLALKLLRDYSADDTRKVHMITENINASWRSIHKRVSEREAALEETHRLLQQFPLDLEKFLAWLTEAETTANVLQDATRKERLLEDSKGVKELMKQWQDLQGEIEAHTDVYHNLDENSQKILRSLEGSDDAVLLQRRLDNMNFKWSELRKKSLNIRSHLEASSDQWKRLHLSLQELLVWLQLKDDELSRQAPIGGDFPAVQKQNDVHRAFKRELKTKEPVIMSTLETVRIFLTEQPLEGLEKLYQEPRELPPEERAQNVTRLLRKQAEEVNTEWEKLNLHSADWQRKIDETLERLQELQEATDELDLKLRQAEVIKGSWQPVGDLLIDSLQDHLEKVKALRGEIAPLKENVSHVNDLARQLTTLGIQLSPYNLSTLEDLNTRWKLLQVAVEDRVRQLHEAHRDFGPASQHFLSTSVQGPWERAISPNKVPYYINHETQTTCWDHPKMTELYQSLADLNNVRFSAYRTAMKLRRLQKALCLDLLSLSAACDALDQHNLKQNDQPMDILQIINCLTTIYDRLEQEHNNLVNVPLCVDMCLNWLLNVYDTGRTGRIRVLSFKTGIISLCKAHLEDKYRYLFKQVASSTGFCDQRRLGLLLHDSIQIPRQLGEVASFGGSNIEPSVRSCFQFANNKPEIEAALFLDWMRLEPQSMVWLPVLHRVAAAETAKHQAKCNICKECPIIGFRYRSLKHFNYDICQSCFFSGRVAKGHKMHYPMVEYCTPTTSGEDVRDFAKVLKNKFRTKRYFAKHPRMGYLPVQTVLEGDNMETPVTLINFWPVDSAPASSPQLSHDDTHSRIEHYASRLAEMENSNGSYLNDSISPNESIDDEHLLIQHYCQSLNQDSPLSQPRSPAQILISLESEERGELERILADLEEENRNLQAEYDRLKQQHEHKGLSPLPSPPEMMPTSPQSPRDAELIAEAKLLRQHKGRLEARMQILEDHNKQLESQLHRLRQLLEQPQAEAKVNGTTVSSPSTSLQRSDSSQPMLLRVVGSQTSDSMGEEDLLSPPQDTSTGLEEVMEQLNNSFPSSRGRNTPGKPMREDTM

SEQ ID NO: 394 - DNA, 7410 bp, Homo sapiens
acactagcaatggcaaagctttgtgcggaggcattgctggctgctctgaactaaaagcatccgtggggaccgaaagaggtttttgcacaccttattaaggaactccaggatggcattgggcagcggcaaactgttgtcagaacattgaatgcaactggggaagaaataattcagcaatcctcaaaaacagatgccagtattctacaggaaaaattgggaagcctgaatctgcggtggcaggaggtctgcaaacagctgtcagacagaaaaaagaggctagaagaacaaaagaatatcttgtcagaatttcaaagagatttaaatgaatttgttttatggttggaggaagcagataacattgctagtatcccacttgaacctggaaaagagcagcaactaaaagaaaagcttgagcaagtcaagttactggtggaagagttgcccctgcgccagggaattctcaaacaattaaatgaaactggaggacccgtgcttgtaagtgctcccataagcccagaagagcaagataaacttgaaaataagctcaagcagacaaatctccagtggataaaggtttccagagctttacctgagaaacaaggagaaattgaagctcaaataaaagaccttgggcagcttgaaaaaaagcttgaagaccttgaagagcagttaaatcatctgctgctgtggttatctcctattaggaatcagttggaaatttataaccaaccaaaccaagaaggaccatttgacgttcaggaaactgaaatagcagttcaagctaaacaaccggatgtggaagagattttgtctaaagggcagcatttgtacaaggaaaaaccagccactcagccagtgaagaggaagttagaagatctgagctctgagtggaaggcggtaaaccgtttacttcaagagctgagggcaaagcagcctgacctagctcctggactgaccactattggagcctctcctactcagactgttactctggtgacacaacctgtggttactaaggaaactgccatctccaaactagaaatgccatcttccttgatgttggaggtacctgctctggcagatttcaaccgggcttggacagaacttaccgactggctttctctgcttgatcaagttataaaatcacagagggtgatggtgggtgaccttgaggatatcaacgagatgatcatcaagcagaaggcaacaatgcaggatttggaacagaggcgtccccagttggaagaactcattaccgctgcccaaaatttgaaaaacaagaccagcaatcaagaggctagaacaatcattacggatcgaattgaaagaattcagaatcagtgggatgaagtacaagaacaccttcagaaccggaggcaacagttgaatgaaatgttaaaggattcaacacaatggctggaagctaaggaagaagctgagcaggtcttaggacaggccagagccaagcttgagtcatggaaggagggtccctatacagtagatgcaatccaaaagaaaatcacagaaaccaagcagttggccaaagacctccgccagtggcagacaaatgtagatgtggcaaatgacttggccctgaaacttctccgggattattctgcagatgataccagaaaagtccacatgataacagagaatatcaatgcctcttggagaagcattcataaaagggtgagtgagcgagaggctgctttggaagaaactcatagattactgcaacagttccccctggacctggaaaagtttcttgcctggcttacagaagctgaaacaactgccaatgtcctacaggatgctacccgtaaggaaaggctcctagaagactccaagggagtaaaagagctgatgaaacaatggcaagacctccaaggtgaaattgaagctcacacagatgtttatcacaacctggatgaaaacagccaaaaaatcctgagatccctggaaggttccgatgatgcagtcctgttacaaagacgtttggataacatgaacttcaagtggagtgaacttcggaaaaagtctctcaacattaggtcccatttggaagccagttctgaccagtggaagcgtctgcacctttctctgcaggaacttctggtgtggctacagctgaaagatgatgaattaagccggcaggcacctattggaggcgactttccagcagttcagaagcagaacgatgtacatagggccttcaagagggaattgaaaactaaagaacctgtaatcatgagtactcttgagactgtacgaatatttctgacagagcagcctttggaaggactagagaaactctaccaggagcccagagagctgcctcctgaggagagagcccagaatgtcactcggcttctacgaaagcaggctgaggaggtcaatactgagtgggaaaaattgaacctgcactccgctgactggcagagaaaaatagatgagacccttgaaagactccaggaacttcaagaggccacggatgagctggacctcaagctgcgccaagctgaggtgatcaagggatcctggcagcccgtgggcgatctcctcattgactctctccaagatcacctcgagaaagtcaaggcacttcgaggagaaattgcgcctctgaaagagaacgtgagccacgtcaatgaccttgctcgccagcttaccactttgggcattcagctctcaccgtataacctcagcactctggaagacctgaacaccagatggaagcttctgcaggtggccgtcgaggaccgagtcaggcagctgcatgaagcccacagggactttggtccagcatctcagcactttctttccacgtctgtccagggtccctgggagagagccatctcgccaaacaaagtgccctactatatcaaccacgagactcaaacaacttgctgggaccatcccaaaatgacagagctctaccagtctttagctgacctgaataatgtcagattctcagcttataggactgccatgaaactccgaagactgcagaaggccctttgcttggatctcttgagcctgtcagctgcatgtgatgccttggaccagcacaacctcaagcaaaatgaccagcccatggatatcctgcagattattaattgtttgaccactatttatgaccgcctggagcaagagcacaacaatttggtcaacgtccctctctgcgtggatatgtgtctgaactggctgctgaatgtttatgatacgggacgaacagggaggatccgtgtcctgtcttttaaaactggcatcatttccctgtgtaaagcacatttggaagacaagtacagataccttttcaagcaagtggcaagttcaacaggattttgtgaccagcgcaggctgggcctccttctgcatgattctatccaaattccaagacagttgggtgaagttgcatcctttgggggcagtaacattgagccaagtgtccggagctgcttccaatttgctaataataagccagagatcgaagcggccctcttcctagactggatgagactggaaccccagtccatggtgtggctgcccgtcctgcacagagtggctgctgcagaaactgccaagcatcaggccaaatgtaacatctgcaaagagtgtccaatcattggattcaggtacaggagtctaaagcactttaattatgacatctgccaaagctgctttttttctggtcgagttgcaaaaggccataaaatgcactatcccatggtggaatattgcactccgactacatcaggagaagatgttcgagactttgccaaggtactaaaaaacaaatttcgaaccaaaaggtattttgcgaagcatccccgaatgggctacctgccagtgcagactgtcttagagggggacaacatggaaactcccgttactctgatcaacttctggccagtagattctgcgcctgcctcgtcccctcagctttcacacgatgatactcattcacgcattgaacattatgctagcaggctagcagaaatggaaaacagcaatggatcttatctaaatgatagcatctctcctaatgagagcatagatgatgaacatttgttaatccagcattactgccaaagtttgaaccaggactcccccctgagccagcctcgtagtcctgcccagatcttgatttccttagagagtgaggaaagaggggagctagagagaatcctagcagatcttgaggaagaaaacaggaatctgcaagcagaatatgaccgtctaaagcagcagcacgaacataaaggcctgtccccactgccgtcccctcctgaaatgatgcccacctctccccagagtccccgggatgctgagctcattgctgaggccaagctactgcgtcaacacaaaggccgcctggaagccaggatgcaaatcctggaagaccacaataaacagctggagtcacagttacacaggctaaggcagctgctggagcaaccccaggcagaggccaaagtgaatggcacaacggtgtcctctccttctacctctctacagaggtccgacagcagtcagcctatgctgctccgagtggttggcagtcaaacttcggactccatgggtgaggaagatcttctcagtcctccccaggacacaagcacagggttagaggaggtgatggagcaactcaacaactccttccctagttcaagaggaagaaatacccctggaaagccaatgagagaggacacaatgtaggaagtcttttccacatggcagatgatttgggcagagcgatggagtccttagtatcagtcatgacagatgaagaaggagcagaataaatgttttacaactcctgattcccgcatggtttttataatattcatacaacaaagaggattagacagtaagagtttacaagaaataaatctatatttttgtgaagggtagtggtattatactgtagatttcagtagtttctaagtctgttattgttttgttaacaatggcaggttttacacgtctatgcaattgtacaaaaaagttataagaaaactacatgtaaaatcttgatagctaaataacttgccatttctttatatggaacgcattttgggttgtttaaaaatttataacagttataaagaaagattgtaaactaaagtgtgctttataaaaaaaagttgtttataaaaacccctaaaaacaaaacaaacacacacacacacacatacacacacacacacaaaactttgaggcagcgcattgttttgcatccttttggcgtgatatccatatgaaattcatggctttttctttttttgcatattaaagataagacttcctctaccaccacaccaaatgactactacacactgctcatttgagaactgtcagctgagtggggcaggcttgagttttcatttcatatatctatatgtctataagtatataaatactatagttatatagataaagagatacgaatttctatagactgactttttccattttttaaatgttcatgtcacatcctaatagaaagaaattacttctagtcagtcatccaggcttacctgcttggtctagaatggatttttcccggagccggaagccaggaggaaactacaccacactaaaacattgtctacagctccagatgtttctcattttaaacaactttccactgacaacgaaagtaaagtaaagtattggatttttttaaagggaacatgtgaatgaatacacaggacttattatatcagagtgagtaatcggttggttggttgattgattgattgattgatacattcagcttcctgctgctagcaatgccacgatttagatttaatgatgcttcagtggaaatcaatcagaaggtattctgaccttgtgaacatcagaaggtattttttaactcccaagcagtagcaggacgatgatagggctggagggctatggattcccagcccatccctgtgaaggagtaggccactctttaagtgaaggattggatgattgttcataatacataaagttctctgtaattacaactaaattattatgccctcttctcacagtcaaaaggaactgggtggtttggtttttgttgcttttttagatttattgtcccatgtgggatgagtttttaaatgccacaagacataatttaaaataaataaactttgggaaaaggtgtaaaacagtagccccatcacatttgtgatactgacaggtatcaacccagaagcccatgaactgtgtttccatcctttgcatttctctgcgagtagttccacacaggtttgtaagtaagtaagaaagaaggcaaattgattcaaatgttacaaaaaaacccttcttggtggattagacaggttaaatatataaacaaacaaacaaaaattgctcaaaaaagaggagaaaagctcaagaggaaaagctaaggactggtaggaaaaagctttactctttcatgccattttatttctttttgatttttaaatcattcattcaatagataccaccgtgtgacctataattttgcaaatctgttacctctgacatcaagtgtaattagcttttggagagtgggctgacatcaagtgtaattagcttttggagagtgggttttgtccattattaataattaattaattaacatcaaacacggcttctcatgctatttctacctcactttggttttggggtgttcctgataattgtgcacacctgagttcacagcttcaccacttgtccattgcgttattttctttttcctttataattctttctttttccttcataattttcaaaagaaaacccaaagctctaaggtaacaaattaccaaattacatgaagatttggtttttgtcttgcatttttttcctttatgtgacgctggaccttttctttacccaaggatttttaaaactcagatttaaaacaaggggttactttacatcctactaagaagtttaagtaagtaagtttcattctaaaatcagaggtaaatagagtgcataaataattttgttttaatctttttgtttttcttttagacacattagctctggagtgagtctgtcataatatttgaacaaaaattgagagctttattgctgcattttaagcataattaatttggacattatttcgtgttgtgttctttataaccaccaagtattaaactgtaaatcataatgtaactgaagcataaacatcacatggcatgttttgtcattgttttcaggtactgagttcttacttgagtatcataatatattgtgttttaacaccaacactgtaacatttacgaattatttttttaaacttcagttttactgcattttcacaacatatcagacttcaccaaatatatgccttactattgtattatagtactgctttactgtgtatctcaataaagcacgcagttatgttac

SEQ ID NO: 395 - protein, 1225 aa, Homo sapiens
MPSSLMLEVPALADFNRAWTELTDWLSLLDQVIKSQRVMVGDLEDINEMIIKQKATMQDLEQRRPQLEELITAAQNLKNKTSNQEARTIITDRIERIQNQWDEVQEHLQNRRQQLNEMLKDSTQWLEAKEEAEQVLGQARAKLESWKEGPYTVDAIQKKITETKQLAKDLRQWQTNVDVANDLALKLLRDYSADDTRKVHMITENINASWRSIHKRVSEREAALEETHRLLQQFPLDLEKFLAWLTEAETTANVLQDATRKERLLEDSKGVKELMKQWQDLQGEIEAHTDVYHNLDENSQKILRSLEGSDDAVLLQRRLDNMNFKWSELRKKSLNIRSHLEASSDQWKRLHLSLQELLVWLQLKDDELSRQAPIGGDFPAVQKQNDVHRAFKRELKTKEPVIMSTLETVRIFLTEQPLEGLEKLYQEPRELPPEERAQNVTRLLRKQAEEVNTEWEKLNLHSADWQRKIDETLERLQELQEATDELDLKLRQAEVIKGSWQPVGDLLIDSLQDHLEKVKALRGEIAPLKENVSHVNDLARQLTTLGIQLSPYNLSTLEDLNTRWKLLQVAVEDRVRQLHEAHRDFGPASQHFLSTSVQGPWERAISPNKVPYYINHETQTTCWDHPKMTELYQSLADLNNVRFSAYRTAMKLRRLQKALCLDLLSLSAACDALDQHNLKQNDQPMDILQIINCLTTIYDRLEQEHNNLVNVPLCVDMCLNWLLNVYDTGRTGRIRVLSFKTGIISLCKAHLEDKYRYLFKQVASSTGFCDQRRLGLLLHDSIQIPRQLGEVASFGGSNIEPSVRSCFQFANNKPEIEAALFLDWMRLEPQSMVWLPVLHRVAAAETAKHQAKCNICKECPIIGFRYRSLKHFNYDICQSCFFSGRVAKGHKMHYPMVEYCTPTTSGEDVRDFAKVLKNKFRTKRYFAKHPRMGYLPVQTVLEGDNMETPVTLINFWPVDSAPASSPQLSHDDTHSRIEHYASRLAEMENSNGSYLNDSISPNESIDDEHLLIQHYCQSLNQDSPLSQPRSPAQILISLESEERGELERILADLEEENRNLQAEYDRLKQQHEHKGLSPLPSPPEMMPTSPQSPRDAELIAEAKLLRQHKGRLEARMQILEDHNKQLESQLHRLRQLLEQPQAEAKVNGTTVSSPSTSLQRSDSSQPMLLRVVGSQTSDSMGEEDLLSPPQDTSTGLEEVMEQLNNSFPSSRGRNTPGKPMREDTM

SEQ ID NO: 396 - DNA, 5623 bp, Homo sapiens
gggttttctcaggattgctatgcaacaggatcagtgctgtagtgcccggttcaagctgaaaatgttacacaggaagacataccatgtaaaggacctccaaggtgaaattgaagctcacacagatgtttatcacaacctggatgaaaacagccaaaaaatcctgagatccctggaaggttccgatgatgcagtcctgttacaaagacgtttggataacatgaacttcaagtggagtgaacttcggaaaaagtctctcaacattaggtcccatttggaagccagttctgaccagtggaagcgtctgcacctttctctgcaggaacttctggtgtggctacagctgaaagatgatgaattaagccggcaggcacctattggaggcgactttccagcagttcagaagcagaacgatgtacatagggccttcaagagggaattgaaaactaaagaacctgtaatcatgagtactcttgagactgtacgaatatttctgacagagcagcctttggaaggactagagaaactctaccaggagcccagagagctgcctcctgaggagagagcccagaatgtcactcggcttctacgaaagcaggctgaggaggtcaatactgagtgggaaaaattgaacctgcactccgctgactggcagagaaaaatagatgagacccttgaaagactccaggaacttcaagaggccacggatgagctggacctcaagctgcgccaagctgaggtgatcaagggatcctggcagcccgtgggcgatctcctcattgactctctccaagatcacctcgagaaagtcaaggcacttcgaggagaaattgcgcctctgaaagagaacgtgagccacgtcaatgaccttgctcgccagcttaccactttgggcattcagctctcaccgtataacctcagcactctggaagacctgaacaccagatggaagcttctgcaggtggccgtcgaggaccgagtcaggcagctgcatgaagcccacagggactttggtccagcatctcagcactttctttccacgtctgtccagggtccctgggagagagccatctcgccaaacaaagtgccctactatatcaaccacgagactcaaacaacttgctgggaccatcccaaaatgacagagctctaccagtctttagctgacctgaataatgtcagattctcagcttataggactgccatgaaactccgaagactgcagaaggccctttgcttggatctcttgagcctgtcagctgcatgtgatgccttggaccagcacaacctcaagcaaaatgaccagcccatggatatcctgcagattattaattgtttgaccactatttatgaccgcctggagcaagagcacaacaatttggtcaacgtccctctctgcgtggatatgtgtctgaactggctgctgaatgtttatgatacgggacgaacagggaggatccgtgtcctgtcttttaaaactggcatcatttccctgtgtaaagcacatttggaagacaagtacagataccttttcaagcaagtggcaagttcaacaggattttgtgaccagcgcaggctgggcctccttctgcatgattctatccaaattccaagacagttgggtgaagttgcatcctttgggggcagtaacattgagccaagtgtccggagctgcttccaatttgctaataataagccagagatcgaagcggccctcttcctagactggatgagactggaaccccagtccatggtgtggctgcccgtcctgcacagagtggctgctgcagaaactgccaagcatcaggccaaatgtaacatctgcaaagagtgtccaatcattggattcaggtacaggagtctaaagcactttaattatgacatctgccaaagctgctttttttctggtcgagttgcaaaaggccataaaatgcactatcccatggtggaatattgcactccgactacatcaggagaagatgttcgagactttgccaaggtactaaaaaacaaatttcgaaccaaaaggtattttgcgaagcatccccgaatgggctacctgccagtgcagactgtcttagagggggacaacatggaaactcccgttactctgatcaacttctggccagtagattctgcgcctgcctcgtcccctcagctttcacacgatgatactcattcacgcattgaacattatgctagcaggctagcagaaatggaaaacagcaatggatcttatctaaatgatagcatctctcctaatgagagcatagatgatgaacatttgttaatccagcattactgccaaagtttgaaccaggactcccccctgagccagcctcgtagtcctgcccagatcttgatttccttagagagtgaggaaagaggggagctagagagaatcctagcagatcttgaggaagaaaacaggaatctgcaagcagaatatgaccgtctaaagcagcagcacgaacataaaggcctgtccccactgccgtcccctcctgaaatgatgcccacctctccccagagtccccgggatgctgagctcattgctgaggccaagctactgcgtcaacacaaaggccgcctggaagccaggatgcaaatcctggaagaccacaataaacagctggagtcacagttacacaggctaaggcagctgctggagcaaccccaggcagaggccaaagtgaatggcacaacggtgtcctctccttctacctctctacagaggtccgacagcagtcagcctatgctgctccgagtggttggcagtcaaacttcggactccatgggtgaggaagatcttctcagtcctccccaggacacaagcacagggttagaggaggtgatggagcaactcaacaactccttccctagttcaagaggaagaaatacccctggaaagccaatgagagaggacacaatgtaggaagtcttttccacatggcagatgatttgggcagagcgatggagtccttagtatcagtcatgacagatgaagaaggagcagaataaatgttttacaactcctgattcccgcatggtttttataatattcatacaacaaagaggattagacagtaagagtttacaagaaataaatctatatttttgtgaagggtagtggtattatactgtagatttcagtagtttctaagtctgttattgttttgttaacaatggcaggttttacacgtctatgcaattgtacaaaaaagttataagaaaactacatgtaaaatcttgatagctaaataacttgccatttctttatatggaacgcattttgggttgtttaaaaatttataacagttataaagaaagattgtaaactaaagtgtgctttataaaaaaaagttgtttataaaaacccctaaaaacaaaacaaacacacacacacacacatacacacacacacacaaaactttgaggcagcgcattgttttgcatccttttggcgtgatatccatatgaaattcatggctttttctttttttgcatattaaagataagacttcctctaccaccacaccaaatgactactacacactgctcatttgagaactgtcagctgagtggggcaggcttgagttttcatttcatatatctatatgtctataagtatataaatactatagttatatagataaagagatacgaatttctatagactgactttttccattttttaaatgttcatgtcacatcctaatagaaagaaattacttctagtcagtcatccaggcttacctgcttggtctagaatggatttttcccggagccggaagccaggaggaaactacaccacactaaaacattgtctacagctccagatgtttctcattttaaacaactttccactgacaacgaaagtaaagtaaagtattggatttttttaaagggaacatgtgaatgaatacacaggacttattatatcagagtgagtaatcggttggttggttgattgattgattgattgatacattcagcttcctgctgctagcaatgccacgatttagatttaatgatgcttcagtggaaatcaatcagaaggtattctgaccttgtgaacatcagaaggtattttttaactcccaagcagtagcaggacgatgatagggctggagggctatggattcccagcccatccctgtgaaggagtaggccactctttaagtgaaggattggatgattgttcataatacataaagttctctgtaattacaactaaattattatgccctcttctcacagtcaaaaggaactgggtggtttggtttttgttgcttttttagatttattgtcccatgtgggatgagtttttaaatgccacaagacataatttaaaataaataaactttgggaaaaggtgtaaaacagtagccccatcacatttgtgatactgacaggtatcaacccagaagcccatgaactgtgtttccatcctttgcatttctctgcgagtagttccacacaggtttgtaagtaagtaagaaagaaggcaaattgattcaaatgttacaaaaaaacccttcttggtggattagacaggttaaatatataaacaaacaaacaaaaattgctcaaaaaagaggagaaaagctcaagaggaaaagctaaggactggtaggaaaaagctttactctttcatgccattttatttctttttgatttttaaatcattcattcaatagataccaccgtgtgacctataattttgcaaatctgttacctctgacatcaagtgtaattagcttttggagagtgggctgacatcaagtgtaattagcttttggagagtgggttttgtccattattaataattaattaattaacatcaaacacggcttctcatgctatttctacctcactttggttttggggtgttcctgataattgtgcacacctgagttcacagcttcaccacttgtccattgcgttattttctttttcctttataattctttctttttccttcataattttcaaaagaaaacccaaagctctaaggtaacaaattaccaaattacatgaagatttggtttttgtcttgcatttttttcctttatgtgacgctggaccttttctttacccaaggatttttaaaactcagatttaaaacaaggggttactttacatcctactaagaagtttaagtaagtaagtttcattctaaaatcagaggtaaatagagtgcataaataattttgttttaatctttttgtttttcttttagacacattagctctggagtgagtctgtcataatatttgaacaaaaattgagagctttattgctgcattttaagcataattaatttggacattatttcgtgttgtgttctttataaccaccaagtattaaactgtaaatcataatgtaactgaagcataaacatcacatggcatgttttgtcattgttttcaggtactgagttcttacttgagtatcataatatattgtgttttaacaccaacactgtaacatttacgaattatttttttaaacttcagttttactgcattttcacaacatatcagacttcaccaaatatatgccttactattgtattatagtactgctttactgtgtatctcaataaagcacgcagttatgttac

SEQ ID NO: 397 - protein, 956 aa, Homo sapiens
MLHRKTYHVKDLQGEIEAHTDVYHNLDENSQKILRSLEGSDDAVLLQRRLDNMNFKWSELRKKSLNIRSHLEASSDQWKRLHLSLQELLVWLQLKDDELSRQAPIGGDFPAVQKQNDVHRAFKRELKTKEPVIMSTLETVRIFLTEQPLEGLEKLYQEPRELPPEERAQNVTRLLRKQAEEVNTEWEKLNLHSADWQRKIDETLERLQELQEATDELDLKLRQAEVIKGSWQPVGDLLIDSLQDHLEKVKALRGEIAPLKENVSHVNDLARQLTTLGIQLSPYNLSTLEDLNTRWKLLQVAVEDRVRQLHEAHRDFGPASQHFLSTSVQGPWERAISPNKVPYYINHETQTTCWDHPKMTELYQSLADLNNVRFSAYRTAMKLRRLQKALCLDLLSLSAACDALDQHNLKQNDQPMDILQIINCLTTIYDRLEQEHNNLVNVPLCVDMCLNWLLNVYDTGRTGRIRVLSFKTGIISLCKAHLEDKYRYLFKQVASSTGFCDQRRLGLLLHDSIQIPRQLGEVASFGGSNIEPSVRSCFQFANNKPEIEAALFLDWMRLEPQSMVWLPVLHRVAAAETAKHQAKCNICKECPIIGFRYRSLKHFNYDICQSCFFSGRVAKGHKMHYPMVEYCTPTTSGEDVRDFAKVLKNKFRTKRYFAKHPRMGYLPVQTVLEGDNMETPVTLINFWPVDSAPASSPQLSHDDTHSRIEHYASRLAEMENSNGSYLNDSISPNESIDDEHLLIQHYCQSLNQDSPLSQPRSPAQILISLESEERGELERILADLEEENRNLQAEYDRLKQQHEHKGLSPLPSPPEMMPTSPQSPRDAELIAEAKLLRQHKGRLEARMQILEDHNKQLESQLHRLRQLLEQPQAEAKVNGTTVSSPSTSLQRSDSSQPMLLRVVGSQTSDSMGEEDLLSPPQDTSTGLEEVMEQLNNSFPSSRGRNTPGKPMREDTM

SEQ ID NO: 398 - DNA, 4623 bp, Homo sapiens
actttcggggagcccggcggctctgggaagctcactcctccactcgtacccacactcgaccgcggagcccttgcagccatgagggaacagctcaaaggccacgagactcaaacaacttgctgggaccatcccaaaatgacagagctctaccagtctttagctgacctgaataatgtcagattctcagcttataggactgccatgaaactccgaagactgcagaaggccctttgcttggatctcttgagcctgtcagctgcatgtgatgccttggaccagcacaacctcaagcaaaatgaccagcccatggatatcctgcagattattaattgtttgaccactatttatgaccgcctggagcaagagcacaacaatttggtcaacgtccctctctgcgtggatatgtgtctgaactggctgctgaatgtttatgatacgggacgaacagggaggatccgtgtcctgtcttttaaaactggcatcatttccctgtgtaaagcacatttggaagacaagtacagataccttttcaagcaagtggcaagttcaacaggattttgtgaccagcgcaggctgggcctccttctgcatgattctatccaaattccaagacagttgggtgaagttgcatcctttgggggcagtaacattgagccaagtgtccggagctgcttccaatttgctaataataagccagagatcgaagcggccctcttcctagactggatgagactggaaccccagtccatggtgtggctgcccgtcctgcacagagtggctgctgcagaaactgccaagcatcaggccaaatgtaacatctgcaaagagtgtccaatcattggattcaggtacaggagtctaaagcactttaattatgacatctgccaaagctgctttttttctggtcgagttgcaaaaggccataaaatgcactatcccatggtggaatattgcactccgactacatcaggagaagatgttcgagactttgccaaggtactaaaaaacaaatttcgaaccaaaaggtattttgcgaagcatccccgaatgggctacctgccagtgcagactgtcttagagggggacaacatggaaactcccgttactctgatcaacttctggccagtagattctgcgcctgcctcgtcccctcagctttcacacgatgatactcattcacgcattgaacattatgctagcaggctagcagaaatggaaaacagcaatggatcttatctaaatgatagcatctctcctaatgagagcatagatgatgaacatttgttaatccagcattactgccaaagtttgaaccaggactcccccctgagccagcctcgtagtcctgcccagatcttgatttccttagagagtgaggaaagaggggagctagagagaatcctagcagatcttgaggaagaaaacaggaatctgcaagcagaatatgaccgtctaaagcagcagcacgaacataaaggcctgtccccactgccgtcccctcctgaaatgatgcccacctctccccagagtccccgggatgctgagctcattgctgaggccaagctactgcgtcaacacaaaggccgcctggaagccaggatgcaaatcctggaagaccacaataaacagctggagtcacagttacacaggctaaggcagctgctggagcaaccccaggcagaggccaaagtgaatggcacaacggtgtcctctccttctacctctctacagaggtccgacagcagtcagcctatgctgctccgagtggttggcagtcaaacttcggactccatgggtgaggaagatcttctcagtcctccccaggacacaagcacagggttagaggaggtgatggagcaactcaacaactccttccctagttcaagaggaagaaatacccctggaaagccaatgagagaggacacaatgtaggaagtcttttccacatggcagatgatttgggcagagcgatggagtccttagtatcagtcatgacagatgaagaaggagcagaataaatgttttacaactcctgattcccgcatggtttttataatattcatacaacaaagaggattagacagtaagagtttacaagaaataaatctatatttttgtgaagggtagtggtattatactgtagatttcagtagtttctaagtctgttattgttttgttaacaatggcaggttttacacgtctatgcaattgtacaaaaaagttataagaaaactacatgtaaaatcttgatagctaaataacttgccatttctttatatggaacgcattttgggttgtttaaaaatttataacagttataaagaaagattgtaaactaaagtgtgctttataaaaaaaagttgtttataaaaacccctaaaaacaaaacaaacacacacacacacacatacacacacacacacaaaactttgaggcagcgcattgttttgcatccttttggcgtgatatccatatgaaattcatggctttttctttttttgcatattaaagataagacttcctctaccaccacaccaaatgactactacacactgctcatttgagaactgtcagctgagtggggcaggcttgagttttcatttcatatatctatatgtctataagtatataaatactatagttatatagataaagagatacgaatttctatagactgactttttccattttttaaatgttcatgtcacatcctaatagaaagaaattacttctagtcagtcatccaggcttacctgcttggtctagaatggatttttcccggagccggaagccaggaggaaactacaccacactaaaacattgtctacagctccagatgtttctcattttaaacaactttccactgacaacgaaagtaaagtaaagtattggatttttttaaagggaacatgtgaatgaatacacaggacttattatatcagagtgagtaatcggttggttggttgattgattgattgattgatacattcagcttcctgctgctagcaatgccacgatttagatttaatgatgcttcagtggaaatcaatcagaaggtattctgaccttgtgaacatcagaaggtattttttaactcccaagcagtagcaggacgatgatagggctggagggctatggattcccagcccatccctgtgaaggagtaggccactctttaagtgaaggattggatgattgttcataatacataaagttctctgtaattacaactaaattattatgccctcttctcacagtcaaaaggaactgggtggtttggtttttgttgcttttttagatttattgtcccatgtgggatgagtttttaaatgccacaagacataatttaaaataaataaactttgggaaaaggtgtaaaacagtagccccatcacatttgtgatactgacaggtatcaacccagaagcccatgaactgtgtttccatcctttgcatttctctgcgagtagttccacacaggtttgtaagtaagtaagaaagaaggcaaattgattcaaatgttacaaaaaaacccttcttggtggattagacaggttaaatatataaacaaacaaacaaaaattgctcaaaaaagaggagaaaagctcaagaggaaaagctaaggactggtaggaaaaagctttactctttcatgccattttatttctttttgatttttaaatcattcattcaatagataccaccgtgtgacctataattttgcaaatctgttacctctgacatcaagtgtaattagcttttggagagtgggctgacatcaagtgtaattagcttttggagagtgggttttgtccattattaataattaattaattaacatcaaacacggcttctcatgctatttctacctcactttggttttggggtgttcctgataattgtgcacacctgagttcacagcttcaccacttgtccattgcgttattttctttttcctttataattctttctttttccttcataattttcaaaagaaaacccaaagctctaaggtaacaaattaccaaattacatgaagatttggtttttgtcttgcatttttttcctttatgtgacgctggaccttttctttacccaaggatttttaaaactcagatttaaaacaaggggttactttacatcctactaagaagtttaagtaagtaagtttcattctaaaatcagaggtaaatagagtgcataaataattttgttttaatctttttgtttttcttttagacacattagctctggagtgagtctgtcataatatttgaacaaaaattgagagctttattgctgcattttaagcataattaatttggacattatttcgtgttgtgttctttataaccaccaagtattaaactgtaaatcataatgtaactgaagcataaacatcacatggcatgttttgtcattgttttcaggtactgagttcttacttgagtatcataatatattgtgttttaacaccaacactgtaacatttacgaattatttttttaaacttcagttttactgcattttcacaacatatcagacttcaccaaatatatgccttactattgtattatagtactgctttactgtgtatctcaataaagcacgcagttatgttac

SEQ ID NO: 399 - protein, 617 aa, Homo sapiens
MREQLKGHETQTTCWDHPKMTELYQSLADLNNVRFSAYRTAMKLRRLQKALCLDLLSLSAACDALDQHNLKQNDQPMDILQIINCLTTIYDRLEQEHNNLVNVPLCVDMCLNWLLNVYDTGRTGRIRVLSFKTGIISLCKAHLEDKYRYLFKQVASSTGFCDQRRLGLLLHDSIQIPRQLGEVASFGGSNIEPSVRSCFQFANNKPEIEAALFLDWMRLEPQSMVWLPVLHRVAAAETAKHQAKCNICKECPIIGFRYRSLKHFNYDICQSCFFSGRVAKGHKMHYPMVEYCTPTTSGEDVRDFAKVLKNKFRTKRYFAKHPRMGYLPVQTVLEGDNMETPVTLINFWPVDSAPASSPQLSHDDTHSRIEHYASRLAEMENSNGSYLNDSISPNESIDDEHLLIQHYCQSLNQDSPLSQPRSPAQILISLESEERGELERILADLEEENRNLQAEYDRLKQQHEHKGLSPLPSPPEMMPTSPQSPRDAELIAEAKLLRQHKGRLEARMQILEDHNKQLESQLHRLRQLLEQPQAEAKVNGTTVSSPSTSLQRSDSSQPMLLRVVGSQTSDSMGEEDLLSPPQDTSTGLEEVMEQLNNSFPSSRGRNTPGKPMREDTM

SEQ ID NO: 400 - DNA, 4591 bp, Homo sapiens
actttcggggagcccggcggctctgggaagctcactcctccactcgtacccacactcgaccgcggagcccttgcagccatgagggaacagctcaaaggccacgagactcaaacaacttgctgggaccatcccaaaatgacagagctctaccagtctttagctgacctgaataatgtcagattctcagcttataggactgccatgaaactccgaagactgcagaaggccctttgcttggatctcttgagcctgtcagctgcatgtgatgccttggaccagcacaacctcaagcaaaatgaccagcccatggatatcctgcagattattaattgtttgaccactatttatgaccgcctggagcaagagcacaacaatttggtcaacgtccctctctgcgtggatatgtgtctgaactggctgctgaatgtttatgatacgggacgaacagggaggatccgtgtcctgtcttttaaaactggcatcatttccctgtgtaaagcacatttggaagacaagtacagataccttttcaagcaagtggcaagttcaacaggattttgtgaccagcgcaggctgggcctccttctgcatgattctatccaaattccaagacagttgggtgaagttgcatcctttgggggcagtaacattgagccaagtgtccggagctgcttccaatttgctaataataagccagagatcgaagcggccctcttcctagactggatgagactggaaccccagtccatggtgtggctgcccgtcctgcacagagtggctgctgcagaaactgccaagcatcaggccaaatgtaacatctgcaaagagtgtccaatcattggattcaggtacaggagtctaaagcactttaattatgacatctgccaaagctgctttttttctggtcgagttgcaaaaggccataaaatgcactatcccatggtggaatattgcactccgactacatcaggagaagatgttcgagactttgccaaggtactaaaaaacaaatttcgaaccaaaaggtattttgcgaagcatccccgaatgggctacctgccagtgcagactgtcttagagggggacaacatggaaactcccgttactctgatcaacttctggccagtagattctgcgcctgcctcgtcccctcagctttcacacgatgatactcattcacgcattgaacattatgctagcaggctagcagaaatggaaaacagcaatggatcttatctaaatgatagcatctctcctaatgagagcatagatgatgaacatttgttaatccagcattactgccaaagtttgaaccaggactcccccctgagccagcctcgtagtcctgcccagatcttgatttccttagagagtgaggaaagaggggagctagagagaatcctagcagatcttgaggaagaaaacaggaatctgcaagcagaatatgaccgtctaaagcagcagcacgaacataaaggcctgtccccactgccgtcccctcctgaaatgatgcccacctctccccagagtccccgggatgctgagctcattgctgaggccaagctactgcgtcaacacaaaggccgcctggaagccaggatgcaaatcctggaagaccacaataaacagctggagtcacagttacacaggctaaggcagctgctggagcaaccccaggcagaggccaaagtgaatggcacaacggtgtcctctccttctacctctctacagaggtccgacagcagtcagcctatgctgctccgagtggttggcagtcaaacttcggactccatgggtgaggaagatcttctcagtcctccccaggacacaagcacagggttagaggaggtgatggagcaactcaacaactccttccctagttcaagaggacacaatgtaggaagtcttttccacatggcagatgatttgggcagagcgatggagtccttagtatcagtcatgacagatgaagaaggagcagaataaatgttttacaactcctgattcccgcatggtttttataatattcatacaacaaagaggattagacagtaagagtttacaagaaataaatctatatttttgtgaagggtagtggtattatactgtagatttcagtagtttctaagtctgttattgttttgttaacaatggcaggttttacacgtctatgcaattgtacaaaaaagttataagaaaactacatgtaaaatcttgatagctaaataacttgccatttctttatatggaacgcattttgggttgtttaaaaatttataacagttataaagaaagattgtaaactaaagtgtgctttataaaaaaaagttgtttataaaaacccctaaaaacaaaacaaacacacacacacacacatacacacacacacacaaaactttgaggcagcgcattgttttgcatccttttggcgtgatatccatatgaaattcatggctttttctttttttgcatattaaagataagacttcctctaccaccacaccaaatgactactacacactgctcatttgagaactgtcagctgagtggggcaggcttgagttttcatttcatatatctatatgtctataagtatataaatactatagttatatagataaagagatacgaatttctatagactgactttttccattttttaaatgttcatgtcacatcctaatagaaagaaattacttctagtcagtcatccaggcttacctgcttggtctagaatggatttttcccggagccggaagccaggaggaaactacaccacactaaaacattgtctacagctccagatgtttctcattttaaacaactttccactgacaacgaaagtaaagtaaagtattggatttttttaaagggaacatgtgaatgaatacacaggacttattatatcagagtgagtaatcggttggttggttgattgattgattgattgatacattcagcttcctgctgctagcaatgccacgatttagatttaatgatgcttcagtggaaatcaatcagaaggtattctgaccttgtgaacatcagaaggtattttttaactcccaagcagtagcaggacgatgatagggctggagggctatggattcccagcccatccctgtgaaggagtaggccactctttaagtgaaggattggatgattgttcataatacataaagttctctgtaattacaactaaattattatgccctcttctcacagtcaaaaggaactgggtggtttggtttttgttgcttttttagatttattgtcccatgtgggatgagtttttaaatgccacaagacataatttaaaataaataaactttgggaaaaggtgtaaaacagtagccccatcacatttgtgatactgacaggtatcaacccagaagcccatgaactgtgtttccatcctttgcatttctctgcgagtagttccacacaggtttgtaagtaagtaagaaagaaggcaaattgattcaaatgttacaaaaaaacccttcttggtggattagacaggttaaatatataaacaaacaaacaaaaattgctcaaaaaagaggagaaaagctcaagaggaaaagctaaggactggtaggaaaaagctttactctttcatgccattttatttctttttgatttttaaatcattcattcaatagataccaccgtgtgacctataattttgcaaatctgttacctctgacatcaagtgtaattagcttttggagagtgggctgacatcaagtgtaattagcttttggagagtgggttttgtccattattaataattaattaattaacatcaaacacggcttctcatgctatttctacctcactttggttttggggtgttcctgataattgtgcacacctgagttcacagcttcaccacttgtccattgcgttattttctttttcctttataattctttctttttccttcataattttcaaaagaaaacccaaagctctaaggtaacaaattaccaaattacatgaagatttggtttttgtcttgcatttttttcctttatgtgacgctggaccttttctttacccaaggatttttaaaactcagatttaaaacaaggggttactttacatcctactaagaagtttaagtaagtaagtttcattctaaaatcagaggtaaatagagtgcataaataattttgttttaatctttttgtttttcttttagacacattagctctggagtgagtctgtcataatatttgaacaaaaattgagagctttattgctgcattttaagcataattaatttggacattatttcgtgttgtgttctttataaccaccaagtattaaactgtaaatcataatgtaactgaagcataaacatcacatggcatgttttgtcattgttttcaggtactgagttcttacttgagtatcataatatattgtgttttaacaccaacactgtaacatttacgaattatttttttaaacttcagttttactgcattttcacaacatatcagacttcaccaaatatatgccttactattgtattatagtactgctttactgtgtatctcaataaagcacgcagttatgttac

SEQ ID NO: 401 - protein, 635 aa, Homo sapiens
MREQLKGHETQTTCWDHPKMTELYQSLADLNNVRFSAYRTAMKLRRLQKALCLDLLSLSAACDALDQHNLKQNDQPMDILQIINCLTTIYDRLEQEHNNLVNVPLCVDMCLNWLLNVYDTGRTGRIRVLSFKTGIISLCKAHLEDKYRYLFKQVASSTGFCDQRRLGLLLHDSIQIPRQLGEVASFGGSNIEPSVRSCFQFANNKPEIEAALFLDWMRLEPQSMVWLPVLHRVAAAETAKHQAKCNICKECPIIGFRYRSLKHFNYDICQSCFFSGRVAKGHKMHYPMVEYCTPTTSGEDVRDFAKVLKNKFRTKRYFAKHPRMGYLPVQTVLEGDNMETPVTLINFWPVDSAPASSPQLSHDDTHSRIEHYASRLAEMENSNGSYLNDSISPNESIDDEHLLIQHYCQSLNQDSPLSQPRSPAQILISLESEERGELERILADLEEENRNLQAEYDRLKQQHEHKGLSPLPSPPEMMPTSPQSPRDAELIAEAKLLRQHKGRLEARMQILEDHNKQLESQLHRLRQLLEQPQAEAKVNGTTVSSPSTSLQRSDSSQPMLLRVVGSQTSDSMGEEDLLSPPQDTSTGLEEVMEQLNNSFPSSRGHNVGSLFHMADDLGRAMESLVSVMTDEEGAE

SEQ ID NO: 402 - DNA, 4584 bp, Homo sapiens
actttcggggagcccggcggctctgggaagctcactcctccactcgtacccacactcgaccgcggagcccttgcagccatgagggaacagctcaaaggccacgagactcaaacaacttgctgggaccatcccaaaatgacagagctctaccagtctttagctgacctgaataatgtcagattctcagcttataggactgccatgaaactccgaagactgcagaaggccctttgcttggatctcttgagcctgtcagctgcatgtgatgccttggaccagcacaacctcaagcaaaatgaccagcccatggatatcctgcagattattaattgtttgaccactatttatgaccgcctggagcaagagcacaacaatttggtcaacgtccctctctgcgtggatatgtgtctgaactggctgctgaatgtttatgatacgggacgaacagggaggatccgtgtcctgtcttttaaaactggcatcatttccctgtgtaaagcacatttggaagacaagtacagataccttttcaagcaagtggcaagttcaacaggattttgtgaccagcgcaggctgggcctccttctgcatgattctatccaaattccaagacagttgggtgaagttgcatcctttgggggcagtaacattgagccaagtgtccggagctgcttccaatttgctaataataagccagagatcgaagcggccctcttcctagactggatgagactggaaccccagtccatggtgtggctgcccgtcctgcacagagtggctgctgcagaaactgccaagcatcaggccaaatgtaacatctgcaaagagtgtccaatcattggattcaggtacaggagtctaaagcactttaattatgacatctgccaaagctgctttttttctggtcgagttgcaaaaggccataaaatgcactatcccatggtggaatattgcactccgactacatcaggagaagatgttcgagactttgccaaggtactaaaaaacaaatttcgaaccaaaaggtattttgcgaagcatccccgaatgggctacctgccagtgcagactgtcttagagggggacaacatggaaacgcctgcctcgtcccctcagctttcacacgatgatactcattcacgcattgaacattatgctagcaggctagcagaaatggaaaacagcaatggatcttatctaaatgatagcatctctcctaatgagagcatagatgatgaacatttgttaatccagcattactgccaaagtttgaaccaggactcccccctgagccagcctcgtagtcctgcccagatcttgatttccttagagagtgaggaaagaggggagctagagagaatcctagcagatcttgaggaagaaaacaggaatctgcaagcagaatatgaccgtctaaagcagcagcacgaacataaaggcctgtccccactgccgtcccctcctgaaatgatgcccacctctccccagagtccccgggatgctgagctcattgctgaggccaagctactgcgtcaacacaaaggccgcctggaagccaggatgcaaatcctggaagaccacaataaacagctggagtcacagttacacaggctaaggcagctgctggagcaaccccaggcagaggccaaagtgaatggcacaacggtgtcctctccttctacctctctacagaggtccgacagcagtcagcctatgctgctccgagtggttggcagtcaaacttcggactccatgggtgaggaagatcttctcagtcctccccaggacacaagcacagggttagaggaggtgatggagcaactcaacaactccttccctagttcaagaggaagaaatacccctggaaagccaatgagagaggacacaatgtaggaagtcttttccacatggcagatgatttgggcagagcgatggagtccttagtatcagtcatgacagatgaagaaggagcagaataaatgttttacaactcctgattcccgcatggtttttataatattcatacaacaaagaggattagacagtaagagtttacaagaaataaatctatatttttgtgaagggtagtggtattatactgtagatttcagtagtttctaagtctgttattgttttgttaacaatggcaggttttacacgtctatgcaattgtacaaaaaagttataagaaaactacatgtaaaatcttgatagctaaataacttgccatttctttatatggaacgcattttgggttgtttaaaaatttataacagttataaagaaagattgtaaactaaagtgtgctttataaaaaaaagttgtttataaaaacccctaaaaacaaaacaaacacacacacacacacatacacacacacacacaaaactttgaggcagcgcattgttttgcatccttttggcgtgatatccatatgaaattcatggctttttctttttttgcatattaaagataagacttcctctaccaccacaccaaatgactactacacactgctcatttgagaactgtcagctgagtggggcaggcttgagttttcatttcatatatctatatgtctataagtatataaatactatagttatatagataaagagatacgaatttctatagactgactttttccattttttaaatgttcatgtcacatcctaatagaaagaaattacttctagtcagtcatccaggcttacctgcttggtctagaatggatttttcccggagccggaagccaggaggaaactacaccacactaaaacattgtctacagctccagatgtttctcattttaaacaactttccactgacaacgaaagtaaagtaaagtattggatttttttaaagggaacatgtgaatgaatacacaggacttattatatcagagtgagtaatcggttggttggttgattgattgattgattgatacattcagcttcctgctgctagcaatgccacgatttagatttaatgatgcttcagtggaaatcaatcagaaggtattctgaccttgtgaacatcagaaggtattttttaactcccaagcagtagcaggacgatgatagggctggagggctatggattcccagcccatccctgtgaaggagtaggccactctttaagtgaaggattggatgattgttcataatacataaagttctctgtaattacaactaaattattatgccctcttctcacagtcaaaaggaactgggtggtttggtttttgttgcttttttagatttattgtcccatgtgggatgagtttttaaatgccacaagacataatttaaaataaataaactttgggaaaaggtgtaaaacagtagccccatcacatttgtgatactgacaggtatcaacccagaagcccatgaactgtgtttccatcctttgcatttctctgcgagtagttccacacaggtttgtaagtaagtaagaaagaaggcaaattgattcaaatgttacaaaaaaacccttcttggtggattagacaggttaaatatataaacaaacaaacaaaaattgctcaaaaaagaggagaaaagctcaagaggaaaagctaaggactggtaggaaaaagctttactctttcatgccattttatttctttttgatttttaaatcattcattcaatagataccaccgtgtgacctataattttgcaaatctgttacctctgacatcaagtgtaattagcttttggagagtgggctgacatcaagtgtaattagcttttggagagtgggttttgtccattattaataattaattaattaacatcaaacacggcttctcatgctatttctacctcactttggttttggggtgttcctgataattgtgcacacctgagttcacagcttcaccacttgtccattgcgttattttctttttcctttataattctttctttttccttcataattttcaaaagaaaacccaaagctctaaggtaacaaattaccaaattacatgaagatttggtttttgtcttgcatttttttcctttatgtgacgctggaccttttctttacccaaggatttttaaaactcagatttaaaacaaggggttactttacatcctactaagaagtttaagtaagtaagtttcattctaaaatcagaggtaaatagagtgcataaataattttgttttaatctttttgtttttcttttagacacattagctctggagtgagtctgtcataatatttgaacaaaaattgagagctttattgctgcattttaagcataattaatttggacattatttcgtgttgtgttctttataaccaccaagtattaaactgtaaatcataatgtaactgaagcataaacatcacatggcatgttttgtcattgttttcaggtactgagttcttacttgagtatcataatatattgtgttttaacaccaacactgtaacatttacgaattatttttttaaacttcagttttactgcattttcacaacatatcagacttcaccaaatatatgccttactattgtattatagtactgctttactgtgtatctcaataaagcacgcagttatgttac

SEQ ID NO: 403 - protein, 604 aa, Homo sapiens
MREQLKGHETQTTCWDHPKMTELYQSLADLNNVRFSAYRTAMKLRRLQKALCLDLLSLSAACDALDQHNLKQNDQPMDILQIINCLTTIYDRLEQEHNNLVNVPLCVDMCLNWLLNVYDTGRTGRIRVLSFKTGIISLCKAHLEDKYRYLFKQVASSTGFCDQRRLGLLLHDSIQIPRQLGEVASFGGSNIEPSVRSCFQFANNKPEIEAALFLDWMRLEPQSMVWLPVLHRVAAAETAKHQAKCNICKECPIIGFRYRSLKHFNYDICQSCFFSGRVAKGHKMHYPMVEYCTPTTSGEDVRDFAKVLKNKFRTKRYFAKHPRMGYLPVQTVLEGDNMETPASSPQLSHDDTHSRIEHYASRLAEMENSNGSYLNDSISPNESIDDEHLLIQHYCQSLNQDSPLSQPRSPAQILISLESEERGELERILADLEEENRNLQAEYDRLKQQHEHKGLSPLPSPPEMMPTSPQSPRDAELIAEAKLLRQHKGRLEARMQILEDHNKQLESQLHRLRQLLEQPQAEAKVNGTTVSSPSTSLQRSDSSQPMLLRVVGSQTSDSMGEEDLLSPPQDTSTGLEEVMEQLNNSFPSSRGRNTPGKPMREDTM

SEQ ID NO: 404 - DNA, 4552 bp, Homo sapiens
actttcggggagcccggcggctctgggaagctcactcctccactcgtacccacactcgaccgcggagcccttgcagccatgagggaacagctcaaaggccacgagactcaaacaacttgctgggaccatcccaaaatgacagagctctaccagtctttagctgacctgaataatgtcagattctcagcttataggactgccatgaaactccgaagactgcagaaggccctttgcttggatctcttgagcctgtcagctgcatgtgatgccttggaccagcacaacctcaagcaaaatgaccagcccatggatatcctgcagattattaattgtttgaccactatttatgaccgcctggagcaagagcacaacaatttggtcaacgtccctctctgcgtggatatgtgtctgaactggctgctgaatgtttatgatacgggacgaacagggaggatccgtgtcctgtcttttaaaactggcatcatttccctgtgtaaagcacatttggaagacaagtacagataccttttcaagcaagtggcaagttcaacaggattttgtgaccagcgcaggctgggcctccttctgcatgattctatccaaattccaagacagttgggtgaagttgcatcctttgggggcagtaacattgagccaagtgtccggagctgcttccaatttgctaataataagccagagatcgaagcggccctcttcctagactggatgagactggaaccccagtccatggtgtggctgcccgtcctgcacagagtggctgctgcagaaactgccaagcatcaggccaaatgtaacatctgcaaagagtgtccaatcattggattcaggtacaggagtctaaagcactttaattatgacatctgccaaagctgctttttttctggtcgagttgcaaaaggccataaaatgcactatcccatggtggaatattgcactccgactacatcaggagaagatgttcgagactttgccaaggtactaaaaaacaaatttcgaaccaaaaggtattttgcgaagcatccccgaatgggctacctgccagtgcagactgtcttagagggggacaacatggaaacgcctgcctcgtcccctcagctttcacacgatgatactcattcacgcattgaacattatgctagcaggctagcagaaatggaaaacagcaatggatcttatctaaatgatagcatctctcctaatgagagcatagatgatgaacatttgttaatccagcattactgccaaagtttgaaccaggactcccccctgagccagcctcgtagtcctgcccagatcttgatttccttagagagtgaggaaagaggggagctagagagaatcctagcagatcttgaggaagaaaacaggaatctgcaagcagaatatgaccgtctaaagcagcagcacgaacataaaggcctgtccccactgccgtcccctcctgaaatgatgcccacctctccccagagtccccgggatgctgagctcattgctgaggccaagctactgcgtcaacacaaaggccgcctggaagccaggatgcaaatcctggaagaccacaataaacagctggagtcacagttacacaggctaaggcagctgctggagcaaccccaggcagaggccaaagtgaatggcacaacggtgtcctctccttctacctctctacagaggtccgacagcagtcagcctatgctgctccgagtggttggcagtcaaacttcggactccatgggtgaggaagatcttctcagtcctccccaggacacaagcacagggttagaggaggtgatggagcaactcaacaactccttccctagttcaagaggacacaatgtaggaagtcttttccacatggcagatgatttgggcagagcgatggagtccttagtatcagtcatgacagatgaagaaggagcagaataaatgttttacaactcctgattcccgcatggtttttataatattcatacaacaaagaggattagacagtaagagtttacaagaaataaatctatatttttgtgaagggtagtggtattatactgtagatttcagtagtttctaagtctgttattgttttgttaacaatggcaggttttacacgtctatgcaattgtacaaaaaagttataagaaaactacatgtaaaatcttgatagctaaataacttgccatttctttatatggaacgcattttgggttgtttaaaaatttataacagttataaagaaagattgtaaactaaagtgtgctttataaaaaaaagttgtttataaaaacccctaaaaacaaaacaaacacacacacacacacatacacacacacacacaaaactttgaggcagcgcattgttttgcatccttttggcgtgatatccatatgaaattcatggctttttctttttttgcatattaaagataagacttcctctaccaccacaccaaatgactactacacactgctcatttgagaactgtcagctgagtggggcaggcttgagttttcatttcatatatctatatgtctataagtatataaatactatagttatatagataaagagatacgaatttctatagactgactttttccattttttaaatgttcatgtcacatcctaatagaaagaaattacttctagtcagtcatccaggcttacctgcttggtctagaatggatttttcccggagccggaagccaggaggaaactacaccacactaaaacattgtctacagctccagatgtttctcattttaaacaactttccactgacaacgaaagtaaagtaaagtattggatttttttaaagggaacatgtgaatgaatacacaggacttattatatcagagtgagtaatcggttggttggttgattgattgattgattgatacattcagcttcctgctgctagcaatgccacgatttagatttaatgatgcttcagtggaaatcaatcagaaggtattctgaccttgtgaacatcagaaggtattttttaactcccaagcagtagcaggacgatgatagggctggagggctatggattcccagcccatccctgtgaaggagtaggccactctttaagtgaaggattggatgattgttcataatacataaagttctctgtaattacaactaaattattatgccctcttctcacagtcaaaaggaactgggtggtttggtttttgttgcttttttagatttattgtcccatgtgggatgagtttttaaatgccacaagacataatttaaaataaataaactttgggaaaaggtgtaaaacagtagccccatcacatttgtgatactgacaggtatcaacccagaagcccatgaactgtgtttccatcctttgcatttctctgcgagtagttccacacaggtttgtaagtaagtaagaaagaaggcaaattgattcaaatgttacaaaaaaacccttcttggtggattagacaggttaaatatataaacaaacaaacaaaaattgctcaaaaaagaggagaaaagctcaagaggaaaagctaaggactggtaggaaaaagctttactctttcatgccattttatttctttttgatttttaaatcattcattcaatagataccaccgtgtgacctataattttgcaaatctgttacctctgacatcaagtgtaattagcttttggagagtgggctgacatcaagtgtaattagcttttggagagtgggttttgtccattattaataattaattaattaacatcaaacacggcttctcatgctatttctacctcactttggttttggggtgttcctgataattgtgcacacctgagttcacagcttcaccacttgtccattgcgttattttctttttcctttataattctttctttttccttcataattttcaaaagaaaacccaaagctctaaggtaacaaattaccaaattacatgaagatttggtttttgtcttgcatttttttcctttatgtgacgctggaccttttctttacccaaggatttttaaaactcagatttaaaacaaggggttactttacatcctactaagaagtttaagtaagtaagtttcattctaaaatcagaggtaaatagagtgcataaataattttgttttaatctttttgtttttcttttagacacattagctctggagtgagtctgtcataatatttgaacaaaaattgagagctttattgctgcattttaagcataattaatttggacattatttcgtgttgtgttctttataaccaccaagtattaaactgtaaatcataatgtaactgaagcataaacatcacatggcatgttttgtcattgttttcaggtactgagttcttacttgagtatcataatatattgtgttttaacaccaacactgtaacatttacgaattatttttttaaacttcagttttactgcattttcacaacatatcagacttcaccaaatatatgccttactattgtattatagtactgctttactgtgtatctcaataaagcacgcagttatgttac

SEQ ID NO: 405 - protein, 622 aa, Homo sapiens
MREQLKGHETQTTCWDHPKMTELYQSLADLNNVRFSAYRTAMKLRRLQKALCLDLLSLSAACDALDQHNLKQNDQPMDILQIINCLTTIYDRLEQEHNNLVNVPLCVDMCLNWLLNVYDTGRTGRIRVLSFKTGIISLCKAHLEDKYRYLFKQVASSTGFCDQRRLGLLLHDSIQIPRQLGEVASFGGSNIEPSVRSCFQFANNKPEIEAALFLDWMRLEPQSMVWLPVLHRVAAAETAKHQAKCNICKECPIIGFRYRSLKHFNYDICQSCFFSGRVAKGHKMHYPMVEYCTPTTSGEDVRDFAKVLKNKFRTKRYFAKHPRMGYLPVQTVLEGDNMETPASSPQLSHDDTHSRIEHYASRLAEMENSNGSYLNDSISPNESIDDEHLLIQHYCQSLNQDSPLSQPRSPAQILISLESEERGELERILADLEEENRNLQAEYDRLKQQHEHKGLSPLPSPPEMMPTSPQSPRDAELIAEAKLLRQHKGRLEARMQILEDHNKQLESQLHRLRQLLEQPQAEAKVNGTTVSSPSTSLQRSDSSQPMLLRVVGSQTSDSMGEEDLLSPPQDTSTGLEEVMEQLNNSFPSSRGHNVGSLFHMADDLGRAMESLVSVMTDEEGAE

SEQ ID NO: 406 - DNA, 1571 bp, Homo sapiens
actttcggggagcccggcggctctgggaagctcactcctccactcgtacccacactcgaccgcggagcccttgcagccatgagggaacagctcaaaggccacgagactcaaacaacttgctgggaccatcccaaaatgacagagctctaccagtctttagctgacctgaataatgtcagattctcagcttataggactgccatgaaactccgaagactgcagaaggccctttgcttggatctcttgagcctgtcagctgcatgtgatgccttggaccagcacaacctcaagcaaaatgaccagcccatggatatcctgcagattattaattgtttgaccactatttatgaccgcctggagcaagagcacaacaatttggtcaacgtccctctctgcgtggatatgtgtctgaactggctgctgaatgtttatgatacgggacgaacagggaggatccgtgtcctgtcttttaaaactggcatcatttccctgtgtaaagcacatttggaagacaagtacagataccttttcaagcaagtggcaagttcaacaggattttgtgaccagcgcaggctgggcctccttctgcatgattctatccaaattccaagacagttgggtgaagttgcatcctttgggggcagtaacattgagccaagtgtccggagctgcttccaatttgctaataataagccagagatcgaagcggccctcttcctagactggatgagactggaaccccagtccatggtgtggctgcccgtcctgcacagagtggctgctgcagaaactgccaagcatcaggccaaatgtaacatctgcaaagagtgtccaatcattggattcaggtacaggagtctaaagcactttaattatgacatctgccaaagctgctttttttctggtcgagttgcaaaaggccataaaatgcactatcccatggtggaatattgcactccgactacatcaggagaagatgttcgagactttgccaaggtactaaaaaacaaatttcgaaccaaaaggtattttgcgaagcatccccgaatgggctacctgccagtgcagactgtcttagagggggacaacatggaaacgtgagtagtagcaaaagcagaacacactcttgtttgatgtatatttgaactcctctcagctgaacaccctccttcactcccaaatgcaaacagtctcttctatttctttctttttatttacattagctgaaaagagaaaaataagctgatgtccagttgccactttcccacgtcacttgacaatttctttttccaaaagttaaactttatctcacagggggaaaaaaaaaaaaaaaccacaacacaatacagccactaattgccttacaagccttataagaaatatgggactgtttacaaatgagtgattccagtatttcattttgattttcctctctcacaaatcagtaaatgtgtgtctttttgtatctcattgtgtggtcatatctagtcacttgtttctactcaaaagaaaatatagtcacaggaaactacttcacagtaagtagtaatgattctcaagatcaaagggga

SEQ ID NO: 407 - protein, 340 aa, Homo sapiens
MREQLKGHETQTTCWDHPKMTELYQSLADLNNVRFSAYRTAMKLRRLQKALCLDLLSLSAACDALDQHNLKQNDQPMDILQIINCLTTIYDRLEQEHNNLVNVPLCVDMCLNWLLNVYDTGRTGRIRVLSFKTGIISLCKAHLEDKYRYLFKQVASSTGFCDQRRLGLLLHDSIQIPRQLGEVASFGGSNIEPSVRSCFQFANNKPEIEAALFLDWMRLEPQSMVWLPVLHRVAAAETAKHQAKCNICKECPIIGFRYRSLKHFNYDICQSCFFSGRVAKGHKMHYPMVEYCTPTTSGEDVRDFAKVLKNKFRTKRYFAKHPRMGYLPVQTVLEGDNMET

SEQ ID NO: 408 - DNA, 7080 bp, Homo sapiens
acactagcaatggcaaagctttgtgcggaggcattgctggctgctctgaactaaaagcatccgtggggaccgaaagaggtttttgcacaccttattaaggaactccaggatggcattgggcagcggcaaactgttgtcagaacattgaatgcaactggggaagaaataattcagcaatcctcaaaaacagatgccagtattctacaggaaaaattgggaagcctgaatctgcggtggcaggaggtctgcaaacagctgtcagacagaaaaaagaggctagaagaacaaaagaatatcttgtcagaatttcaaagagatttaaatgaatttgttttatggttggaggaagcagataacattgctagtatcccacttgaacctggaaaagagcagcaactaaaagaaaagcttgagcaagtcaagttactggtggaagagttgcccctgcgccagggaattctcaaacaattaaatgaaactggaggacccgtgcttgtaagtgctcccataagcccagaagagcaagataaacttgaaaataagctcaagcagacaaatctccagtggataaaggtttccagagctttacctgagaaacaaggagaaattgaagctcaaataaaagaccttgggcagcttgaaaaaaagcttgaagaccttgaagagcagttaaatcatctgctgctgtggttatctcctattaggaatcagttggaaatttataaccaaccaaaccaagaaggaccatttgacgttcaggaaactgaaatagcagttcaagctaaacaaccggatgtggaagagattttgtctaaagggcagcatttgtacaaggaaaaaccagccactcagccagtgaagaggaagttagaagatctgagctctgagtggaaggcggtaaaccgtttacttcaagagctgagggcaaagcagcctgacctagctcctggactgaccactattggagcctctcctactcagactgttactctggtgacacaacctgtggttactaaggaaactgccatctccaaactagaaatgccatcttccttgatgttggaggtacctgctctggcagatttcaaccgggcttggacagaacttaccgactggctttctctgcttgatcaagttataaaatcacagagggtgatggtgggtgaccttgaggatatcaacgagatgatcatcaagcagaaggcaacaatgcaggatttggaacagaggcgtccccagttggaagaactcattaccgctgcccaaaatttgaaaaacaagaccagcaatcaagaggctagaacaatcattacggatcgaattgaaagaattcagaatcagtgggatgaagtacaagaacaccttcagaaccggaggcaacagttgaatgaaatgttaaaggattcaacacaatggctggaagctaaggaagaagctgagcaggtcttaggacaggccagagccaagcttgagtcatggaaggagggtccctatacagtagatgcaatccaaaagaaaatcacagaaaccaagcagttggccaaagacctccgccagtggcagacaaatgtagatgtggcaaatgacttggccctgaaacttctccgggattattctgcagatgataccagaaaagtccacatgataacagagaatatcaatgcctcttggagaagcattcataaaagggtgagtgagcgagaggctgctttggaagaaactcatagattactgcaacagttccccctggacctggaaaagtttcttgcctggcttacagaagctgaaacaactgccaatgtcctacaggatgctacccgtaaggaaaggctcctagaagactccaagggagtaaaagagctgatgaaacaatggcaagacctccaaggtgaaattgaagctcacacagatgtttatcacaacctggatgaaaacagccaaaaaatcctgagatccctggaaggttccgatgatgcagtcctgttacaaagacgtttggataacatgaacttcaagtggagtgaacttcggaaaaagtctctcaacattaggtcccatttggaagccagttctgaccagtggaagcgtctgcacctttctctgcaggaacttctggtgtggctacagctgaaagatgatgaattaagccggcaggcacctattggaggcgactttccagcagttcagaagcagaacgatgtacatagggccttcaagagggaattgaaaactaaagaacctgtaatcatgagtactcttgagactgtacgaatatttctgacagagcagcctttggaaggactagagaaactctaccaggagcccagagagctgcctcctgaggagagagcccagaatgtcactcggcttctacgaaagcaggctgaggaggtcaatactgagtgggaaaaattgaacctgcactccgctgactggcagagaaaaatagatgagacccttgaaagactccaggaacttcaagaggccacggatgagctggacctcaagctgcgccaagctgaggtgatcaagggatcctggcagcccgtgggcgatctcctcattgactctctccaagatcacctcgagaaagtcaaggcacttcgaggagaaattgcgcctctgaaagagaacgtgagccacgtcaatgaccttgctcgccagcttaccactttgggcattcagctctcaccgtataacctcagcactctggaagacctgaacaccagatggaagcttctgcaggtggccgtcgaggaccgagtcaggcagctgcatgaagcccacagggactttggtccagcatctcagcactttctttccacgtctgtccagggtccctgggagagagccatctcgccaaacaaagtgccctactatatcaaccacgagactcaaacaacttgctgggaccatcccaaaatgacagagctctaccagtctttagctgacctgaataatgtcagattctcagcttataggactgccatgaaactccgaagactgcagaaggccctttgcttggatctcttgagcctgtcagctgcatgtgatgccttggaccagcacaacctcaagcaaaatgaccagcccatggatatcctgcagattattaattgtttgaccactatttatgaccgcctggagcaagagcacaacaatttggtcaacgtccctctctgcgtggatatgtgtctgaactggctgctgaatgtttatgatacgggacgaacagggaggatccgtgtcctgtcttttaaaactggcatcatttccctgtgtaaagcacatttggaagacaagtacagataccttttcaagcaagtggcaagttcaacaggattttgtgaccagcgcaggctgggcctccttctgcatgattctatccaaattccaagacagttgggtgaagttgcatcctttgggggcagtaacattgagccaagtgtccggagctgcttccaatttgctaataataagccagagatcgaagcggccctcttcctagactggatgagactggaaccccagtccatggtgtggctgcccgtcctgcacagagtggctgctgcagaaactgccaagcatcaggccaaatgtaacatctgcaaagagtgtccaatcattggattcaggtacaggagtctaaagcactttaattatgacatctgccaaagctgctttttttctggtcgagttgcaaaaggccataaaatgcactatcccatggtggaatattgcactccgactacatcaggagaagatgttcgagactttgccaaggtactaaaaaacaaatttcgaaccaaaaggtattttgcgaagcatccccgaatgggctacctgccagtgcagactgtcttagagggggacaacatggaaacgaatctgcaagcagaatatgaccgtctaaagcagcagcacgaacataaaggcctgtccccactgccgtcccctcctgaaatgatgcccacctctccccagagtccccgggatgctgagctcattgctgaggccaagctactgcgtcaacacaaaggccgcctggaagccaggatgcaaatcctggaagaccacaataaacagctggagtcacagttacacaggctaaggcagctgctggagcaaccccaggcagaggccaaagtgaatggcacaacggtgtcctctccttctacctctctacagaggtccgacagcagtcagcctatgctgctccgagtggttggcagtcaaacttcggactccatgggtgaggaagatcttctcagtcctccccaggacacaagcacagggttagaggaggtgatggagcaactcaacaactccttccctagttcaagaggaagaaatacccctggaaagccaatgagagaggacacaatgtaggaagtcttttccacatggcagatgatttgggcagagcgatggagtccttagtatcagtcatgacagatgaagaaggagcagaataaatgttttacaactcctgattcccgcatggtttttataatattcatacaacaaagaggattagacagtaagagtttacaagaaataaatctatatttttgtgaagggtagtggtattatactgtagatttcagtagtttctaagtctgttattgttttgttaacaatggcaggttttacacgtctatgcaattgtacaaaaaagttataagaaaactacatgtaaaatcttgatagctaaataacttgccatttctttatatggaacgcattttgggttgtttaaaaatttataacagttataaagaaagattgtaaactaaagtgtgctttataaaaaaaagttgtttataaaaacccctaaaaacaaaacaaacacacacacacacacatacacacacacacacaaaactttgaggcagcgcattgttttgcatccttttggcgtgatatccatatgaaattcatggctttttctttttttgcatattaaagataagacttcctctaccaccacaccaaatgactactacacactgctcatttgagaactgtcagctgagtggggcaggcttgagttttcatttcatatatctatatgtctataagtatataaatactatagttatatagataaagagatacgaatttctatagactgactttttccattttttaaatgttcatgtcacatcctaatagaaagaaattacttctagtcagtcatccaggcttacctgcttggtctagaatggatttttcccggagccggaagccaggaggaaactacaccacactaaaacattgtctacagctccagatgtttctcattttaaacaactttccactgacaacgaaagtaaagtaaagtattggatttttttaaagggaacatgtgaatgaatacacaggacttattatatcagagtgagtaatcggttggttggttgattgattgattgattgatacattcagcttcctgctgctagcaatgccacgatttagatttaatgatgcttcagtggaaatcaatcagaaggtattctgaccttgtgaacatcagaaggtattttttaactcccaagcagtagcaggacgatgatagggctggagggctatggattcccagcccatccctgtgaaggagtaggccactctttaagtgaaggattggatgattgttcataatacataaagttctctgtaattacaactaaattattatgccctcttctcacagtcaaaaggaactgggtggtttggtttttgttgcttttttagatttattgtcccatgtgggatgagtttttaaatgccacaagacataatttaaaataaataaactttgggaaaaggtgtaaaacagtagccccatcacatttgtgatactgacaggtatcaacccagaagcccatgaactgtgtttccatcctttgcatttctctgcgagtagttccacacaggtttgtaagtaagtaagaaagaaggcaaattgattcaaatgttacaaaaaaacccttcttggtggattagacaggttaaatatataaacaaacaaacaaaaattgctcaaaaaagaggagaaaagctcaagaggaaaagctaaggactggtaggaaaaagctttactctttcatgccattttatttctttttgatttttaaatcattcattcaatagataccaccgtgtgacctataattttgcaaatctgttacctctgacatcaagtgtaattagcttttggagagtgggctgacatcaagtgtaattagcttttggagagtgggttttgtccattattaataattaattaattaacatcaaacacggcttctcatgctatttctacctcactttggttttggggtgttcctgataattgtgcacacctgagttcacagcttcaccacttgtccattgcgttattttctttttcctttataattctttctttttccttcataattttcaaaagaaaacccaaagctctaaggtaacaaattaccaaattacatgaagatttggtttttgtcttgcatttttttcctttatgtgacgctggaccttttctttacccaaggatttttaaaactcagatttaaaacaaggggttactttacatcctactaagaagtttaagtaagtaagtttcattctaaaatcagaggtaaatagagtgcataaataattttgttttaatctttttgtttttcttttagacacattagctctggagtgagtctgtcataatatttgaacaaaaattgagagctttattgctgcattttaagcataattaatttggacattatttcgtgttgtgttctttataaccaccaagtattaaactgtaaatcataatgtaactgaagcataaacatcacatggcatgttttgtcattgttttcaggtactgagttcttacttgagtatcataatatattgtgttttaacaccaacactgtaacatttacgaattatttttttaaacttcagttttactgcattttcacaacatatcagacttcaccaaatatatgccttactattgtattatagtactgctttactgtgtatctcaataaagcacgcagttatgttac

SEQ ID NO: 409 - protein, 1115 aa, Homo sapiens
MPSSLMLEVPALADFNRAWTELTDWLSLLDQVIKSQRVMVGDLEDINEMIIKQKATMQDLEQRRPQLEELITAAQNLKNKTSNQEARTIITDRIERIQNQWDEVQEHLQNRRQQLNEMLKDSTQWLEAKEEAEQVLGQARAKLESWKEGPYTVDAIQKKITETKQLAKDLRQWQTNVDVANDLALKLLRDYSADDTRKVHMITENINASWRSIHKRVSEREAALEETHRLLQQFPLDLEKFLAWLTEAETTANVLQDATRKERLLEDSKGVKELMKQWQDLQGEIEAHTDVYHNLDENSQKILRSLEGSDDAVLLQRRLDNMNFKWSELRKKSLNIRSHLEASSDQWKRLHLSLQELLVWLQLKDDELSRQAPIGGDFPAVQKQNDVHRAFKRELKTKEPVIMSTLETVRIFLTEQPLEGLEKLYQEPRELPPEERAQNVTRLLRKQAEEVNTEWEKLNLHSADWQRKIDETLERLQELQEATDELDLKLRQAEVIKGSWQPVGDLLIDSLQDHLEKVKALRGEIAPLKENVSHVNDLARQLTTLGIQLSPYNLSTLEDLNTRWKLLQVAVEDRVRQLHEAHRDFGPASQHFLSTSVQGPWERAISPNKVPYYINHETQTTCWDHPKMTELYQSLADLNNVRFSAYRTAMKLRRLQKALCLDLLSLSAACDALDQHNLKQNDQPMDILQIINCLTTIYDRLEQEHNNLVNVPLCVDMCLNWLLNVYDTGRTGRIRVLSFKTGIISLCKAHLEDKYRYLFKQVASSTGFCDQRRLGLLLHDSIQIPRQLGEVASFGGSNIEPSVRSCFQFANNKPEIEAALFLDWMRLEPQSMVWLPVLHRVAAAETAKHQAKCNICKECPIIGFRYRSLKHFNYDICQSCFFSGRVAKGHKMHYPMVEYCTPTTSGEDVRDFAKVLKNKFRTKRYFAKHPRMGYLPVQTVLEGDNMETNLQAEYDRLKQQHEHKGLSPLPSPPEMMPTSPQSPRDAELIAEAKLLRQHKGRLEARMQILEDHNKQLESQLHRLRQLLEQPQAEAKVNGTTVSSPSTSLQRSDSSQPMLLRVVGSQTSDSMGEEDLLSPPQDTSTGLEEVMEQLNNSFPSSRGRNTPGKPMREDTM

SEQ ID NO: 410 - DNA, 7378 bp, Homo sapiens
acactagcaatggcaaagctttgtgcggaggcattgctggctgctctgaactaaaagcatccgtggggaccgaaagaggtttttgcacaccttattaaggaactccaggatggcattgggcagcggcaaactgttgtcagaacattgaatgcaactggggaagaaataattcagcaatcctcaaaaacagatgccagtattctacaggaaaaattgggaagcctgaatctgcggtggcaggaggtctgcaaacagctgtcagacagaaaaaagaggctagaagaacaaaagaatatcttgtcagaatttcaaagagatttaaatgaatttgttttatggttggaggaagcagataacattgctagtatcccacttgaacctggaaaagagcagcaactaaaagaaaagcttgagcaagtcaagttactggtggaagagttgcccctgcgccagggaattctcaaacaattaaatgaaactggaggacccgtgcttgtaagtgctcccataagcccagaagagcaagataaacttgaaaataagctcaagcagacaaatctccagtggataaaggtttccagagctttacctgagaaacaaggagaaattgaagctcaaataaaagaccttgggcagcttgaaaaaaagcttgaagaccttgaagagcagttaaatcatctgctgctgtggttatctcctattaggaatcagttggaaatttataaccaaccaaaccaagaaggaccatttgacgttcaggaaactgaaatagcagttcaagctaaacaaccggatgtggaagagattttgtctaaagggcagcatttgtacaaggaaaaaccagccactcagccagtgaagaggaagttagaagatctgagctctgagtggaaggcggtaaaccgtttacttcaagagctgagggcaaagcagcctgacctagctcctggactgaccactattggagcctctcctactcagactgttactctggtgacacaacctgtggttactaaggaaactgccatctccaaactagaaatgccatcttccttgatgttggaggtacctgctctggcagatttcaaccgggcttggacagaacttaccgactggctttctctgcttgatcaagttataaaatcacagagggtgatggtgggtgaccttgaggatatcaacgagatgatcatcaagcagaaggcaacaatgcaggatttggaacagaggcgtccccagttggaagaactcattaccgctgcccaaaatttgaaaaacaagaccagcaatcaagaggctagaacaatcattacggatcgaattgaaagaattcagaatcagtgggatgaagtacaagaacaccttcagaaccggaggcaacagttgaatgaaatgttaaaggattcaacacaatggctggaagctaaggaagaagctgagcaggtcttaggacaggccagagccaagcttgagtcatggaaggagggtccctatacagtagatgcaatccaaaagaaaatcacagaaaccaagcagttggccaaagacctccgccagtggcagacaaatgtagatgtggcaaatgacttggccctgaaacttctccgggattattctgcagatgataccagaaaagtccacatgataacagagaatatcaatgcctcttggagaagcattcataaaagggtgagtgagcgagaggctgctttggaagaaactcatagattactgcaacagttccccctggacctggaaaagtttcttgcctggcttacagaagctgaaacaactgccaatgtcctacaggatgctacccgtaaggaaaggctcctagaagactccaagggagtaaaagagctgatgaaacaatggcaagacctccaaggtgaaattgaagctcacacagatgtttatcacaacctggatgaaaacagccaaaaaatcctgagatccctggaaggttccgatgatgcagtcctgttacaaagacgtttggataacatgaacttcaagtggagtgaacttcggaaaaagtctctcaacattaggtcccatttggaagccagttctgaccagtggaagcgtctgcacctttctctgcaggaacttctggtgtggctacagctgaaagatgatgaattaagccggcaggcacctattggaggcgactttccagcagttcagaagcagaacgatgtacatagggccttcaagagggaattgaaaactaaagaacctgtaatcatgagtactcttgagactgtacgaatatttctgacagagcagcctttggaaggactagagaaactctaccaggagcccagagagctgcctcctgaggagagagcccagaatgtcactcggcttctacgaaagcaggctgaggaggtcaatactgagtgggaaaaattgaacctgcactccgctgactggcagagaaaaatagatgagacccttgaaagactccaggaacttcaagaggccacggatgagctggacctcaagctgcgccaagctgaggtgatcaagggatcctggcagcccgtgggcgatctcctcattgactctctccaagatcacctcgagaaagtcaaggcacttcgaggagaaattgcgcctctgaaagagaacgtgagccacgtcaatgaccttgctcgccagcttaccactttgggcattcagctctcaccgtataacctcagcactctggaagacctgaacaccagatggaagcttctgcaggtggccgtcgaggaccgagtcaggcagctgcatgaagcccacagggactttggtccagcatctcagcactttctttccacgtctgtccagggtccctgggagagagccatctcgccaaacaaagtgccctactatatcaaccacgagactcaaacaacttgctgggaccatcccaaaatgacagagctctaccagtctttagctgacctgaataatgtcagattctcagcttataggactgccatgaaactccgaagactgcagaaggccctttgcttggatctcttgagcctgtcagctgcatgtgatgccttggaccagcacaacctcaagcaaaatgaccagcccatggatatcctgcagattattaattgtttgaccactatttatgaccgcctggagcaagagcacaacaatttggtcaacgtccctctctgcgtggatatgtgtctgaactggctgctgaatgtttatgatacgggacgaacagggaggatccgtgtcctgtcttttaaaactggcatcatttccctgtgtaaagcacatttggaagacaagtacagataccttttcaagcaagtggcaagttcaacaggattttgtgaccagcgcaggctgggcctccttctgcatgattctatccaaattccaagacagttgggtgaagttgcatcctttgggggcagtaacattgagccaagtgtccggagctgcttccaatttgctaataataagccagagatcgaagcggccctcttcctagactggatgagactggaaccccagtccatggtgtggctgcccgtcctgcacagagtggctgctgcagaaactgccaagcatcaggccaaatgtaacatctgcaaagagtgtccaatcattggattcaggtacaggagtctaaagcactttaattatgacatctgccaaagctgctttttttctggtcgagttgcaaaaggccataaaatgcactatcccatggtggaatattgcactccgactacatcaggagaagatgttcgagactttgccaaggtactaaaaaacaaatttcgaaccaaaaggtattttgcgaagcatccccgaatgggctacctgccagtgcagactgtcttagagggggacaacatggaaactcccgttactctgatcaacttctggccagtagattctgcgcctgcctcgtcccctcagctttcacacgatgatactcattcacgcattgaacattatgctagcaggctagcagaaatggaaaacagcaatggatcttatctaaatgatagcatctctcctaatgagagcatagatgatgaacatttgttaatccagcattactgccaaagtttgaaccaggactcccccctgagccagcctcgtagtcctgcccagatcttgatttccttagagagtgaggaaagaggggagctagagagaatcctagcagatcttgaggaagaaaacaggaatctgcaagcagaatatgaccgtctaaagcagcagcacgaacataaaggcctgtccccactgccgtcccctcctgaaatgatgcccacctctccccagagtccccgggatgctgagctcattgctgaggccaagctactgcgtcaacacaaaggccgcctggaagccaggatgcaaatcctggaagaccacaataaacagctggagtcacagttacacaggctaaggcagctgctggagcaaccccaggcagaggccaaagtgaatggcacaacggtgtcctctccttctacctctctacagaggtccgacagcagtcagcctatgctgctccgagtggttggcagtcaaacttcggactccatgggtgaggaagatcttctcagtcctccccaggacacaagcacagggttagaggaggtgatggagcaactcaacaactccttccctagttcaagaggacacaatgtaggaagtcttttccacatggcagatgatttgggcagagcgatggagtccttagtatcagtcatgacagatgaagaaggagcagaataaatgttttacaactcctgattcccgcatggtttttataatattcatacaacaaagaggattagacagtaagagtttacaagaaataaatctatatttttgtgaagggtagtggtattatactgtagatttcagtagtttctaagtctgttattgttttgttaacaatggcaggttttacacgtctatgcaattgtacaaaaaagttataagaaaactacatgtaaaatcttgatagctaaataacttgccatttctttatatggaacgcattttgggttgtttaaaaatttataacagttataaagaaagattgtaaactaaagtgtgctttataaaaaaaagttgtttataaaaacccctaaaaacaaaacaaacacacacacacacacatacacacacacacacaaaactttgaggcagcgcattgttttgcatccttttggcgtgatatccatatgaaattcatggctttttctttttttgcatattaaagataagacttcctctaccaccacaccaaatgactactacacactgctcatttgagaactgtcagctgagtggggcaggcttgagttttcatttcatatatctatatgtctataagtatataaatactatagttatatagataaagagatacgaatttctatagactgactttttccattttttaaatgttcatgtcacatcctaatagaaagaaattacttctagtcagtcatccaggcttacctgcttggtctagaatggatttttcccggagccggaagccaggaggaaactacaccacactaaaacattgtctacagctccagatgtttctcattttaaacaactttccactgacaacgaaagtaaagtaaagtattggatttttttaaagggaacatgtgaatgaatacacaggacttattatatcagagtgagtaatcggttggttggttgattgattgattgattgatacattcagcttcctgctgctagcaatgccacgatttagatttaatgatgcttcagtggaaatcaatcagaaggtattctgaccttgtgaacatcagaaggtattttttaactcccaagcagtagcaggacgatgatagggctggagggctatggattcccagcccatccctgtgaaggagtaggccactctttaagtgaaggattggatgattgttcataatacataaagttctctgtaattacaactaaattattatgccctcttctcacagtcaaaaggaactgggtggtttggtttttgttgcttttttagatttattgtcccatgtgggatgagtttttaaatgccacaagacataatttaaaataaataaactttgggaaaaggtgtaaaacagtagccccatcacatttgtgatactgacaggtatcaacccagaagcccatgaactgtgtttccatcctttgcatttctctgcgagtagttccacacaggtttgtaagtaagtaagaaagaaggcaaattgattcaaatgttacaaaaaaacccttcttggtggattagacaggttaaatatataaacaaacaaacaaaaattgctcaaaaaagaggagaaaagctcaagaggaaaagctaaggactggtaggaaaaagctttactctttcatgccattttatttctttttgatttttaaatcattcattcaatagataccaccgtgtgacctataattttgcaaatctgttacctctgacatcaagtgtaattagcttttggagagtgggctgacatcaagtgtaattagcttttggagagtgggttttgtccattattaataattaattaattaacatcaaacacggcttctcatgctatttctacctcactttggttttggggtgttcctgataattgtgcacacctgagttcacagcttcaccacttgtccattgcgttattttctttttcctttataattctttctttttccttcataattttcaaaagaaaacccaaagctctaaggtaacaaattaccaaattacatgaagatttggtttttgtcttgcatttttttcctttatgtgacgctggaccttttctttacccaaggatttttaaaactcagatttaaaacaaggggttactttacatcctactaagaagtttaagtaagtaagtttcattctaaaatcagaggtaaatagagtgcataaataattttgttttaatctttttgtttttcttttagacacattagctctggagtgagtctgtcataatatttgaacaaaaattgagagctttattgctgcattttaagcataattaatttggacattatttcgtgttgtgttctttataaccaccaagtattaaactgtaaatcataatgtaactgaagcataaacatcacatggcatgttttgtcattgttttcaggtactgagttcttacttgagtatcataatatattgtgttttaacaccaacactgtaacatttacgaattatttttttaaacttcagttttactgcattttcacaacatatcagacttcaccaaatatatgccttactattgtattatagtactgctttactgtgtatctcaataaagcacgcagttatgttac

SEQ ID NO: 411 - protein, 1243 aa, Homo sapiens
MPSSLMLEVPALADFNRAWTELTDWLSLLDQVIKSQRVMVGDLEDINEMIIKQKATMQDLEQRRPQLEELITAAQNLKNKTSNQEARTIITDRIERIQNQWDEVQEHLQNRRQQLNEMLKDSTQWLEAKEEAEQVLGQARAKLESWKEGPYTVDAIQKKITETKQLAKDLRQWQTNVDVANDLALKLLRDYSADDTRKVHMITENINASWRSIHKRVSEREAALEETHRLLQQFPLDLEKFLAWLTEAETTANVLQDATRKERLLEDSKGVKELMKQWQDLQGEIEAHTDVYHNLDENSQKILRSLEGSDDAVLLQRRLDNMNFKWSELRKKSLNIRSHLEASSDQWKRLHLSLQELLVWLQLKDDELSRQAPIGGDFPAVQKQNDVHRAFKRELKTKEPVIMSTLETVRIFLTEQPLEGLEKLYQEPRELPPEERAQNVTRLLRKQAEEVNTEWEKLNLHSADWQRKIDETLERLQELQEATDELDLKLRQAEVIKGSWQPVGDLLIDSLQDHLEKVKALRGEIAPLKENVSHVNDLARQLTTLGIQLSPYNLSTLEDLNTRWKLLQVAVEDRVRQLHEAHRDFGPASQHFLSTSVQGPWERAISPNKVPYYINHETQTTCWDHPKMTELYQSLADLNNVRFSAYRTAMKLRRLQKALCLDLLSLSAACDALDQHNLKQNDQPMDILQIINCLTTIYDRLEQEHNNLVNVPLCVDMCLNWLLNVYDTGRTGRIRVLSFKTGIISLCKAHLEDKYRYLFKQVASSTGFCDQRRLGLLLHDSIQIPRQLGEVASFGGSNIEPSVRSCFQFANNKPEIEAALFLDWMRLEPQSMVWLPVLHRVAAAETAKHQAKCNICKECPIIGFRYRSLKHFNYDICQSCFFSGRVAKGHKMHYPMVEYCTPTTSGEDVRDFAKVLKNKFRTKRYFAKHPRMGYLPVQTVLEGDNMETPVTLINFWPVDSAPASSPQLSHDDTHSRIEHYASRLAEMENSNGSYLNDSISPNESIDDEHLLIQHYCQSLNQDSPLSQPRSPAQILISLESEERGELERILADLEEENRNLQAEYDRLKQQHEHKGLSPLPSPPEMMPTSPQSPRDAELIAEAKLLRQHKGRLEARMQILEDHNKQLESQLHRLRQLLEQPQAEAKVNGTTVSSPSTSLQRSDSSQPMLLRVVGSQTSDSMGEEDLLSPPQDTSTGLEEVMEQLNNSFPSSRGHNVGSLFHMADDLGRAMESLVSVMTDEEGAE

SEQ ID NO: 412 - DNA, 7339 bp, Homo sapiens
acactagcaatggcaaagctttgtgcggaggcattgctggctgctctgaactaaaagcatccgtggggaccgaaagaggtttttgcacaccttattaaggaactccaggatggcattgggcagcggcaaactgttgtcagaacattgaatgcaactggggaagaaataattcagcaatcctcaaaaacagatgccagtattctacaggaaaaattgggaagcctgaatctgcggtggcaggaggtctgcaaacagctgtcagacagaaaaaagaggctagaagaacaaaagaatatcttgtcagaatttcaaagagatttaaatgaatttgttttatggttggaggaagcagataacattgctagtatcccacttgaacctggaaaagagcagcaactaaaagaaaagcttgagcaagtcaagttactggtggaagagttgcccctgcgccagggaattctcaaacaattaaatgaaactggaggacccgtgcttgtaagtgctcccataagcccagaagagcaagataaacttgaaaataagctcaagcagacaaatctccagtggataaaggtttccagagctttacctgagaaacaaggagaaattgaagctcaaataaaagaccttgggcagcttgaaaaaaagcttgaagaccttgaagagcagttaaatcatctgctgctgtggttatctcctattaggaatcagttggaaatttataaccaaccaaaccaagaaggaccatttgacgttcaggaaactgaaatagcagttcaagctaaacaaccggatgtggaagagattttgtctaaagggcagcatttgtacaaggaaaaaccagccactcagccagtgaagaggaagttagaagatctgagctctgagtggaaggcggtaaaccgtttacttcaagagctgagggcaaagcagcctgacctagctcctggactgaccactattggagcctctcctactcagactgttactctggtgacacaacctgtggttactaaggaaactgccatctccaaactagaaatgccatcttccttgatgttggaggtacctgctctggcagatttcaaccgggcttggacagaacttaccgactggctttctctgcttgatcaagttataaaatcacagagggtgatggtgggtgaccttgaggatatcaacgagatgatcatcaagcagaaggcaacaatgcaggatttggaacagaggcgtccccagttggaagaactcattaccgctgcccaaaatttgaaaaacaagaccagcaatcaagaggctagaacaatcattacggatcgaattgaaagaattcagaatcagtgggatgaagtacaagaacaccttcagaaccggaggcaacagttgaatgaaatgttaaaggattcaacacaatggctggaagctaaggaagaagctgagcaggtcttaggacaggccagagccaagcttgagtcatggaaggagggtccctatacagtagatgcaatccaaaagaaaatcacagaaaccaagcagttggccaaagacctccgccagtggcagacaaatgtagatgtggcaaatgacttggccctgaaacttctccgggattattctgcagatgataccagaaaagtccacatgataacagagaatatcaatgcctcttggagaagcattcataaaagggtgagtgagcgagaggctgctttggaagaaactcatagattactgcaacagttccccctggacctggaaaagtttcttgcctggcttacagaagctgaaacaactgccaatgtcctacaggatgctacccgtaaggaaaggctcctagaagactccaagggagtaaaagagctgatgaaacaatggcaagacctccaaggtgaaattgaagctcacacagatgtttatcacaacctggatgaaaacagccaaaaaatcctgagatccctggaaggttccgatgatgcagtcctgttacaaagacgtttggataacatgaacttcaagtggagtgaacttcggaaaaagtctctcaacattaggtcccatttggaagccagttctgaccagtggaagcgtctgcacctttctctgcaggaacttctggtgtggctacagctgaaagatgatgaattaagccggcaggcacctattggaggcgactttccagcagttcagaagcagaacgatgtacatagggccttcaagagggaattgaaaactaaagaacctgtaatcatgagtactcttgagactgtacgaatatttctgacagagcagcctttggaaggactagagaaactctaccaggagcccagagagctgcctcctgaggagagagcccagaatgtcactcggcttctacgaaagcaggctgaggaggtcaatactgagtgggaaaaattgaacctgcactccgctgactggcagagaaaaatagatgagacccttgaaagactccaggaacttcaagaggccacggatgagctggacctcaagctgcgccaagctgaggtgatcaagggatcctggcagcccgtgggcgatctcctcattgactctctccaagatcacctcgagaaagtcaaggcacttcgaggagaaattgcgcctctgaaagagaacgtgagccacgtcaatgaccttgctcgccagcttaccactttgggcattcagctctcaccgtataacctcagcactctggaagacctgaacaccagatggaagcttctgcaggtggccgtcgaggaccgagtcaggcagctgcatgaagcccacagggactttggtccagcatctcagcactttctttccacgtctgtccagggtccctgggagagagccatctcgccaaacaaagtgccctactatatcaaccacgagactcaaacaacttgctgggaccatcccaaaatgacagagctctaccagtctttagctgacctgaataatgtcagattctcagcttataggactgccatgaaactccgaagactgcagaaggccctttgcttggatctcttgagcctgtcagctgcatgtgatgccttggaccagcacaacctcaagcaaaatgaccagcccatggatatcctgcagattattaattgtttgaccactatttatgaccgcctggagcaagagcacaacaatttggtcaacgtccctctctgcgtggatatgtgtctgaactggctgctgaatgtttatgatacgggacgaacagggaggatccgtgtcctgtcttttaaaactggcatcatttccctgtgtaaagcacatttggaagacaagtacagataccttttcaagcaagtggcaagttcaacaggattttgtgaccagcgcaggctgggcctccttctgcatgattctatccaaattccaagacagttgggtgaagttgcatcctttgggggcagtaacattgagccaagtgtccggagctgcttccaatttgctaataataagccagagatcgaagcggccctcttcctagactggatgagactggaaccccagtccatggtgtggctgcccgtcctgcacagagtggctgctgcagaaactgccaagcatcaggccaaatgtaacatctgcaaagagtgtccaatcattggattcaggtacaggagtctaaagcactttaattatgacatctgccaaagctgctttttttctggtcgagttgcaaaaggccataaaatgcactatcccatggtggaatattgcactccgactacatcaggagaagatgttcgagactttgccaaggtactaaaaaacaaatttcgaaccaaaaggtattttgcgaagcatccccgaatgggctacctgccagtgcagactgtcttagagggggacaacatggaaacgcctgcctcgtcccctcagctttcacacgatgatactcattcacgcattgaacattatgctagcaggctagcagaaatggaaaacagcaatggatcttatctaaatgatagcatctctcctaatgagagcatagatgatgaacatttgttaatccagcattactgccaaagtttgaaccaggactcccccctgagccagcctcgtagtcctgcccagatcttgatttccttagagagtgaggaaagaggggagctagagagaatcctagcagatcttgaggaagaaaacaggaatctgcaagcagaatatgaccgtctaaagcagcagcacgaacataaaggcctgtccccactgccgtcccctcctgaaatgatgcccacctctccccagagtccccgggatgctgagctcattgctgaggccaagctactgcgtcaacacaaaggccgcctggaagccaggatgcaaatcctggaagaccacaataaacagctggagtcacagttacacaggctaaggcagctgctggagcaaccccaggcagaggccaaagtgaatggcacaacggtgtcctctccttctacctctctacagaggtccgacagcagtcagcctatgctgctccgagtggttggcagtcaaacttcggactccatgggtgaggaagatcttctcagtcctccccaggacacaagcacagggttagaggaggtgatggagcaactcaacaactccttccctagttcaagaggacacaatgtaggaagtcttttccacatggcagatgatttgggcagagcgatggagtccttagtatcagtcatgacagatgaagaaggagcagaataaatgttttacaactcctgattcccgcatggtttttataatattcatacaacaaagaggattagacagtaagagtttacaagaaataaatctatatttttgtgaagggtagtggtattatactgtagatttcagtagtttctaagtctgttattgttttgttaacaatggcaggttttacacgtctatgcaattgtacaaaaaagttataagaaaactacatgtaaaatcttgatagctaaataacttgccatttctttatatggaacgcattttgggttgtttaaaaatttataacagttataaagaaagattgtaaactaaagtgtgctttataaaaaaaagttgtttataaaaacccctaaaaacaaaacaaacacacacacacacacatacacacacacacacaaaactttgaggcagcgcattgttttgcatccttttggcgtgatatccatatgaaattcatggctttttctttttttgcatattaaagataagacttcctctaccaccacaccaaatgactactacacactgctcatttgagaactgtcagctgagtggggcaggcttgagttttcatttcatatatctatatgtctataagtatataaatactatagttatatagataaagagatacgaatttctatagactgactttttccattttttaaatgttcatgtcacatcctaatagaaagaaattacttctagtcagtcatccaggcttacctgcttggtctagaatggatttttcccggagccggaagccaggaggaaactacaccacactaaaacattgtctacagctccagatgtttctcattttaaacaactttccactgacaacgaaagtaaagtaaagtattggatttttttaaagggaacatgtgaatgaatacacaggacttattatatcagagtgagtaatcggttggttggttgattgattgattgattgatacattcagcttcctgctgctagcaatgccacgatttagatttaatgatgcttcagtggaaatcaatcagaaggtattctgaccttgtgaacatcagaaggtattttttaactcccaagcagtagcaggacgatgatagggctggagggctatggattcccagcccatccctgtgaaggagtaggccactctttaagtgaaggattggatgattgttcataatacataaagttctctgtaattacaactaaattattatgccctcttctcacagtcaaaaggaactgggtggtttggtttttgttgcttttttagatttattgtcccatgtgggatgagtttttaaatgccacaagacataatttaaaataaataaactttgggaaaaggtgtaaaacagtagccccatcacatttgtgatactgacaggtatcaacccagaagcccatgaactgtgtttccatcctttgcatttctctgcgagtagttccacacaggtttgtaagtaagtaagaaagaaggcaaattgattcaaatgttacaaaaaaacccttcttggtggattagacaggttaaatatataaacaaacaaacaaaaattgctcaaaaaagaggagaaaagctcaagaggaaaagctaaggactggtaggaaaaagctttactctttcatgccattttatttctttttgatttttaaatcattcattcaatagataccaccgtgtgacctataattttgcaaatctgttacctctgacatcaagtgtaattagcttttggagagtgggctgacatcaagtgtaattagcttttggagagtgggttttgtccattattaataattaattaattaacatcaaacacggcttctcatgctatttctacctcactttggttttggggtgttcctgataattgtgcacacctgagttcacagcttcaccacttgtccattgcgttattttctttttcctttataattctttctttttccttcataattttcaaaagaaaacccaaagctctaaggtaacaaattaccaaattacatgaagatttggtttttgtcttgcatttttttcctttatgtgacgctggaccttttctttacccaaggatttttaaaactcagatttaaaacaaggggttactttacatcctactaagaagtttaagtaagtaagtttcattctaaaatcagaggtaaatagagtgcataaataattttgttttaatctttttgtttttcttttagacacattagctctggagtgagtctgtcataatatttgaacaaaaattgagagctttattgctgcattttaagcataattaatttggacattatttcgtgttgtgttctttataaccaccaagtattaaactgtaaatcataatgtaactgaagcataaacatcacatggcatgttttgtcattgttttcaggtactgagttcttacttgagtatcataatatattgtgttttaacaccaacactgtaacatttacgaattatttttttaaacttcagttttactgcattttcacaacatatcagacttcaccaaatatatgccttactattgtattatagtactgctttactgtgtatctcaataaagcacgcagttatgttac

SEQ ID NO: 413 - protein, 1230 aa, Homo sapiens
MPSSLMLEVPALADFNRAWTELTDWLSLLDQVIKSQRVMVGDLEDINEMIIKQKATMQDLEQRRPQLEELITAAQNLKNKTSNQEARTIITDRIERIQNQWDEVQEHLQNRRQQLNEMLKDSTQWLEAKEEAEQVLGQARAKLESWKEGPYTVDAIQKKITETKQLAKDLRQWQTNVDVANDLALKLLRDYSADDTRKVHMITENINASWRSIHKRVSEREAALEETHRLLQQFPLDLEKFLAWLTEAETTANVLQDATRKERLLEDSKGVKELMKQWQDLQGEIEAHTDVYHNLDENSQKILRSLEGSDDAVLLQRRLDNMNFKWSELRKKSLNIRSHLEASSDQWKRLHLSLQELLVWLQLKDDELSRQAPIGGDFPAVQKQNDVHRAFKRELKTKEPVIMSTLETVRIFLTEQPLEGLEKLYQEPRELPPEERAQNVTRLLRKQAEEVNTEWEKLNLHSADWQRKIDETLERLQELQEATDELDLKLRQAEVIKGSWQPVGDLLIDSLQDHLEKVKALRGEIAPLKENVSHVNDLARQLTTLGIQLSPYNLSTLEDLNTRWKLLQVAVEDRVRQLHEAHRDFGPASQHFLSTSVQGPWERAISPNKVPYYINHETQTTCWDHPKMTELYQSLADLNNVRFSAYRTAMKLRRLQKALCLDLLSLSAACDALDQHNLKQNDQPMDILQIINCLTTIYDRLEQEHNNLVNVPLCVDMCLNWLLNVYDTGRTGRIRVLSFKTGIISLCKAHLEDKYRYLFKQVASSTGFCDQRRLGLLLHDSIQIPRQLGEVASFGGSNIEPSVRSCFQFANNKPEIEAALFLDWMRLEPQSMVWLPVLHRVAAAETAKHQAKCNICKECPIIGFRYRSLKHFNYDICQSCFFSGRVAKGHKMHYPMVEYCTPTTSGEDVRDFAKVLKNKFRTKRYFAKHPRMGYLPVQTVLEGDNMETPASSPQLSHDDTHSRIEHYASRLAEMENSNGSYLNDSISPNESIDDEHLLIQHYCQSLNQDSPLSQPRSPAQILISLESEERGELERILADLEEENRNLQAEYDRLKQQHEHKGLSPLPSPPEMMPTSPQSPRDAELIAEAKLLRQHKGRLEARMQILEDHNKQLESQLHRLRQLLEQPQAEAKVNGTTVSSPSTSLQRSDSSQPMLLRVVGSQTSDSMGEEDLLSPPQDTSTGLEEVMEQLNNSFPSSRGHNVGSLFHMADDLGRAMESLVSVMTDEEGAE

SEQ ID NO: 414 - DNA, 7048 bp, Homo sapiens
acactagcaatggcaaagctttgtgcggaggcattgctggctgctctgaactaaaagcatccgtggggaccgaaagaggtttttgcacaccttattaaggaactccaggatggcattgggcagcggcaaactgttgtcagaacattgaatgcaactggggaagaaataattcagcaatcctcaaaaacagatgccagtattctacaggaaaaattgggaagcctgaatctgcggtggcaggaggtctgcaaacagctgtcagacagaaaaaagaggctagaagaacaaaagaatatcttgtcagaatttcaaagagatttaaatgaatttgttttatggttggaggaagcagataacattgctagtatcccacttgaacctggaaaagagcagcaactaaaagaaaagcttgagcaagtcaagttactggtggaagagttgcccctgcgccagggaattctcaaacaattaaatgaaactggaggacccgtgcttgtaagtgctcccataagcccagaagagcaagataaacttgaaaataagctcaagcagacaaatctccagtggataaaggtttccagagctttacctgagaaacaaggagaaattgaagctcaaataaaagaccttgggcagcttgaaaaaaagcttgaagaccttgaagagcagttaaatcatctgctgctgtggttatctcctattaggaatcagttggaaatttataaccaaccaaaccaagaaggaccatttgacgttcaggaaactgaaatagcagttcaagctaaacaaccggatgtggaagagattttgtctaaagggcagcatttgtacaaggaaaaaccagccactcagccagtgaagaggaagttagaagatctgagctctgagtggaaggcggtaaaccgtttacttcaagagctgagggcaaagcagcctgacctagctcctggactgaccactattggagcctctcctactcagactgttactctggtgacacaacctgtggttactaaggaaactgccatctccaaactagaaatgccatcttccttgatgttggaggtacctgctctggcagatttcaaccgggcttggacagaacttaccgactggctttctctgcttgatcaagttataaaatcacagagggtgatggtgggtgaccttgaggatatcaacgagatgatcatcaagcagaaggcaacaatgcaggatttggaacagaggcgtccccagttggaagaactcattaccgctgcccaaaatttgaaaaacaagaccagcaatcaagaggctagaacaatcattacggatcgaattgaaagaattcagaatcagtgggatgaagtacaagaacaccttcagaaccggaggcaacagttgaatgaaatgttaaaggattcaacacaatggctggaagctaaggaagaagctgagcaggtcttaggacaggccagagccaagcttgagtcatggaaggagggtccctatacagtagatgcaatccaaaagaaaatcacagaaaccaagcagttggccaaagacctccgccagtggcagacaaatgtagatgtggcaaatgacttggccctgaaacttctccgggattattctgcagatgataccagaaaagtccacatgataacagagaatatcaatgcctcttggagaagcattcataaaagggtgagtgagcgagaggctgctttggaagaaactcatagattactgcaacagttccccctggacctggaaaagtttcttgcctggcttacagaagctgaaacaactgccaatgtcctacaggatgctacccgtaaggaaaggctcctagaagactccaagggagtaaaagagctgatgaaacaatggcaagacctccaaggtgaaattgaagctcacacagatgtttatcacaacctggatgaaaacagccaaaaaatcctgagatccctggaaggttccgatgatgcagtcctgttacaaagacgtttggataacatgaacttcaagtggagtgaacttcggaaaaagtctctcaacattaggtcccatttggaagccagttctgaccagtggaagcgtctgcacctttctctgcaggaacttctggtgtggctacagctgaaagatgatgaattaagccggcaggcacctattggaggcgactttccagcagttcagaagcagaacgatgtacatagggccttcaagagggaattgaaaactaaagaacctgtaatcatgagtactcttgagactgtacgaatatttctgacagagcagcctttggaaggactagagaaactctaccaggagcccagagagctgcctcctgaggagagagcccagaatgtcactcggcttctacgaaagcaggctgaggaggtcaatactgagtgggaaaaattgaacctgcactccgctgactggcagagaaaaatagatgagacccttgaaagactccaggaacttcaagaggccacggatgagctggacctcaagctgcgccaagctgaggtgatcaagggatcctggcagcccgtgggcgatctcctcattgactctctccaagatcacctcgagaaagtcaaggcacttcgaggagaaattgcgcctctgaaagagaacgtgagccacgtcaatgaccttgctcgccagcttaccactttgggcattcagctctcaccgtataacctcagcactctggaagacctgaacaccagatggaagcttctgcaggtggccgtcgaggaccgagtcaggcagctgcatgaagcccacagggactttggtccagcatctcagcactttctttccacgtctgtccagggtccctgggagagagccatctcgccaaacaaagtgccctactatatcaaccacgagactcaaacaacttgctgggaccatcccaaaatgacagagctctaccagtctttagctgacctgaataatgtcagattctcagcttataggactgccatgaaactccgaagactgcagaaggccctttgcttggatctcttgagcctgtcagctgcatgtgatgccttggaccagcacaacctcaagcaaaatgaccagcccatggatatcctgcagattattaattgtttgaccactatttatgaccgcctggagcaagagcacaacaatttggtcaacgtccctctctgcgtggatatgtgtctgaactggctgctgaatgtttatgatacgggacgaacagggaggatccgtgtcctgtcttttaaaactggcatcatttccctgtgtaaagcacatttggaagacaagtacagataccttttcaagcaagtggcaagttcaacaggattttgtgaccagcgcaggctgggcctccttctgcatgattctatccaaattccaagacagttgggtgaagttgcatcctttgggggcagtaacattgagccaagtgtccggagctgcttccaatttgctaataataagccagagatcgaagcggccctcttcctagactggatgagactggaaccccagtccatggtgtggctgcccgtcctgcacagagtggctgctgcagaaactgccaagcatcaggccaaatgtaacatctgcaaagagtgtccaatcattggattcaggtacaggagtctaaagcactttaattatgacatctgccaaagctgctttttttctggtcgagttgcaaaaggccataaaatgcactatcccatggtggaatattgcactccgactacatcaggagaagatgttcgagactttgccaaggtactaaaaaacaaatttcgaaccaaaaggtattttgcgaagcatccccgaatgggctacctgccagtgcagactgtcttagagggggacaacatggaaacgaatctgcaagcagaatatgaccgtctaaagcagcagcacgaacataaaggcctgtccccactgccgtcccctcctgaaatgatgcccacctctccccagagtccccgggatgctgagctcattgctgaggccaagctactgcgtcaacacaaaggccgcctggaagccaggatgcaaatcctggaagaccacaataaacagctggagtcacagttacacaggctaaggcagctgctggagcaaccccaggcagaggccaaagtgaatggcacaacggtgtcctctccttctacctctctacagaggtccgacagcagtcagcctatgctgctccgagtggttggcagtcaaacttcggactccatgggtgaggaagatcttctcagtcctccccaggacacaagcacagggttagaggaggtgatggagcaactcaacaactccttccctagttcaagaggacacaatgtaggaagtcttttccacatggcagatgatttgggcagagcgatggagtccttagtatcagtcatgacagatgaagaaggagcagaataaatgttttacaactcctgattcccgcatggtttttataatattcatacaacaaagaggattagacagtaagagtttacaagaaataaatctatatttttgtgaagggtagtggtattatactgtagatttcagtagtttctaagtctgttattgttttgttaacaatggcaggttttacacgtctatgcaattgtacaaaaaagttataagaaaactacatgtaaaatcttgatagctaaataacttgccatttctttatatggaacgcattttgggttgtttaaaaatttataacagttataaagaaagattgtaaactaaagtgtgctttataaaaaaaagttgtttataaaaacccctaaaaacaaaacaaacacacacacacacacatacacacacacacacaaaactttgaggcagcgcattgttttgcatccttttggcgtgatatccatatgaaattcatggctttttctttttttgcatattaaagataagacttcctctaccaccacaccaaatgactactacacactgctcatttgagaactgtcagctgagtggggcaggcttgagttttcatttcatatatctatatgtctataagtatataaatactatagttatatagataaagagatacgaatttctatagactgactttttccattttttaaatgttcatgtcacatcctaatagaaagaaattacttctagtcagtcatccaggcttacctgcttggtctagaatggatttttcccggagccggaagccaggaggaaactacaccacactaaaacattgtctacagctccagatgtttctcattttaaacaactttccactgacaacgaaagtaaagtaaagtattggatttttttaaagggaacatgtgaatgaatacacaggacttattatatcagagtgagtaatcggttggttggttgattgattgattgattgatacattcagcttcctgctgctagcaatgccacgatttagatttaatgatgcttcagtggaaatcaatcagaaggtattctgaccttgtgaacatcagaaggtattttttaactcccaagcagtagcaggacgatgatagggctggagggctatggattcccagcccatccctgtgaaggagtaggccactctttaagtgaaggattggatgattgttcataatacataaagttctctgtaattacaactaaattattatgccctcttctcacagtcaaaaggaactgggtggtttggtttttgttgcttttttagatttattgtcccatgtgggatgagtttttaaatgccacaagacataatttaaaataaataaactttgggaaaaggtgtaaaacagtagccccatcacatttgtgatactgacaggtatcaacccagaagcccatgaactgtgtttccatcctttgcatttctctgcgagtagttccacacaggtttgtaagtaagtaagaaagaaggcaaattgattcaaatgttacaaaaaaacccttcttggtggattagacaggttaaatatataaacaaacaaacaaaaattgctcaaaaaagaggagaaaagctcaagaggaaaagctaaggactggtaggaaaaagctttactctttcatgccattttatttctttttgatttttaaatcattcattcaatagataccaccgtgtgacctataattttgcaaatctgttacctctgacatcaagtgtaattagcttttggagagtgggctgacatcaagtgtaattagcttttggagagtgggttttgtccattattaataattaattaattaacatcaaacacggcttctcatgctatttctacctcactttggttttggggtgttcctgataattgtgcacacctgagttcacagcttcaccacttgtccattgcgttattttctttttcctttataattctttctttttccttcataattttcaaaagaaaacccaaagctctaaggtaacaaattaccaaattacatgaagatttggtttttgtcttgcatttttttcctttatgtgacgctggaccttttctttacccaaggatttttaaaactcagatttaaaacaaggggttactttacatcctactaagaagtttaagtaagtaagtttcattctaaaatcagaggtaaatagagtgcataaataattttgttttaatctttttgtttttcttttagacacattagctctggagtgagtctgtcataatatttgaacaaaaattgagagctttattgctgcattttaagcataattaatttggacattatttcgtgttgtgttctttataaccaccaagtattaaactgtaaatcataatgtaactgaagcataaacatcacatggcatgttttgtcattgttttcaggtactgagttcttacttgagtatcataatatattgtgttttaacaccaacactgtaacatttacgaattatttttttaaacttcagttttactgcattttcacaacatatcagacttcaccaaatatatgccttactattgtattatagtactgctttactgtgtatctcaataaagcacgcagttatgttac

SEQ ID NO: 415 - protein, 1133 aa, Homo sapiens
MPSSLMLEVPALADFNRAWTELTDWLSLLDQVIKSQRVMVGDLEDINEMIIKQKATMQDLEQRRPQLEELITAAQNLKNKTSNQEARTIITDRIERIQNQWDEVQEHLQNRRQQLNEMLKDSTQWLEAKEEAEQVLGQARAKLESWKEGPYTVDAIQKKITETKQLAKDLRQWQTNVDVANDLALKLLRDYSADDTRKVHMITENINASWRSIHKRVSEREAALEETHRLLQQFPLDLEKFLAWLTEAETTANVLQDATRKERLLEDSKGVKELMKQWQDLQGEIEAHTDVYHNLDENSQKILRSLEGSDDAVLLQRRLDNMNFKWSELRKKSLNIRSHLEASSDQWKRLHLSLQELLVWLQLKDDELSRQAPIGGDFPAVQKQNDVHRAFKRELKTKEPVIMSTLETVRIFLTEQPLEGLEKLYQEPRELPPEERAQNVTRLLRKQAEEVNTEWEKLNLHSADWQRKIDETLERLQELQEATDELDLKLRQAEVIKGSWQPVGDLLIDSLQDHLEKVKALRGEIAPLKENVSHVNDLARQLTTLGIQLSPYNLSTLEDLNTRWKLLQVAVEDRVRQLHEAHRDFGPASQHFLSTSVQGPWERAISPNKVPYYINHETQTTCWDHPKMTELYQSLADLNNVRFSAYRTAMKLRRLQKALCLDLLSLSAACDALDQHNLKQNDQPMDILQIINCLTTIYDRLEQEHNNLVNVPLCVDMCLNWLLNVYDTGRTGRIRVLSFKTGIISLCKAHLEDKYRYLFKQVASSTGFCDQRRLGLLLHDSIQIPRQLGEVASFGGSNIEPSVRSCFQFANNKPEIEAALFLDWMRLEPQSMVWLPVLHRVAAAETAKHQAKCNICKECPIIGFRYRSLKHFNYDICQSCFFSGRVAKGHKMHYPMVEYCTPTTSGEDVRDFAKVLKNKFRTKRYFAKHPRMGYLPVQTVLEGDNMETNLQAEYDRLKQQHEHKGLSPLPSPPEMMPTSPQSPRDAELIAEAKLLRQHKGRLEARMQILEDHNKQLESQLHRLRQLLEQPQAEAKVNGTTVSSPSTSLQRSDSSQPMLLRVVGSQTSDSMGEEDLLSPPQDTSTGLEEVMEQLNNSFPSSRGHNVGSLFHMADDLGRAMESLVSVMTDEEGAE

SEQ ID NO: 416 - DNA, 13897 bp, Homo sapiens
acctaacctaacttgaatcatgcgaaaggggagctgttggaattcaaatagactttctggttcccagcagtcggcagtaatagaatgctttcaggaagatgacagaatcaggagaaagatgctgttttgcactatcttgatttgttacagcagccaacttattggcatgatggagtgacaggaaaaacagctggcatggaagatgaaagagaagatgttcaaaagaaaacattcacaaaatgggtaaatgcacaattttctaagtttgggaagcagcatattgagaacctcttcagtgacctacaggatgggaggcgcctcctagacctcctcgaaggcctgacagggcaaaaactgccaaaagaaaaaggatccacaagagttcatgccctgaacaatgtcaacaaggcactgcgggttttgcagaacaataatgttgatttagtgaatattggaagtactgacatcgtagatggaaatcataaactgactcttggtttgatttggaatataatcctccactggcaggtcaaaaatgtaatgaaaaatatcatggctggattgcaacaaaccaacagtgaaaagattctcctgagctgggtccgacaatcaactcgtaattatccacaggttaatgtaatcaacttcaccaccagctggtctgatggcctggctttgaatgctctcatccatagtcataggccagacctatttgactggaatagtgtggtttgccagcagtcagccacacaacgactggaacatgcattcaacatcgccagatatcaattaggcatagagaaactactcgatcctgaagatgttgataccacctatccagataagaagtccatcttaatgtacatcacatcactcttccaagttttgcctcaacaagtgagcattgaagccatccaggaagtggaaatgttgccaaggccacctaaagtgactaaagaagaacattttcagttacatcatcaaatgcactattctcaacagatcacggtcagtctagcacagggatatgagagaacttcttcccctaagcctcgattcaagagctatgcctacacacaggctgcttatgtcaccacctctgaccctacacggagcccatttccttcacagcatttggaagctcctgaagacaagtcatttggcagttcattgatggagagtgaagtaaacctggaccgttatcaaacagctttagaagaagtattatcgtggcttctttctgctgaggacacattgcaagcacaaggagagatttctaatgatgtggaagtggtgaaagaccagtttcatactcatgaggggtacatgatggatttgacagcccatcagggccgggttggtaatattctacaattgggaagtaagctgattggaacaggaaaattatcagaagatgaagaaactgaagtacaagagcagatgaatctcctaaattcaagatgggaatgcctcagggtagctagcatggaaaaacaaagcaatttacatagagttttaatggatctccagaatcagaaactgaaagagttgaatgactggctaacaaaaacagaagaaagaacaaggaaaatggaggaagagcctcttggacctgatcttgaagacctaaaacgccaagtacaacaacataaggtgcttcaagaagatctagaacaagaacaagtcagggtcaattctctcactcacatggtggtggtagttgatgaatctagtggagatcacgcaactgctgctttggaagaacaacttaaggtattgggagatcgatgggcaaacatctgtagatggacagaagaccgctgggttcttttacaagacatccttctcaaatggcaacgtcttactgaagaacagtgcctttttagtgcatggctttcagaaaaagaagatgcagtgaacaagattcacacaactggctttaaagatcaaaatgaaatgttatcaagtcttcaaaaactggccgttttaaaagcggatctagaaaagaaaaagcaatccatgggcaaactgtattcactcaaacaagatcttctttcaacactgaagaataagtcagtgacccagaagacggaagcatggctggataactttgcccggtgttgggataatttagtccaaaaacttgaaaagagtacagcacagatttcacaggctgtcaccaccactcagccatcactaacacagacaactgtaatggaaacagtaactacggtgaccacaagggaacagatcctggtaaagcatgctcaagaggaacttccaccaccacctccccaaaagaagaggcagattactgtggattctgaaattaggaaaaggttggatgttgatataactgaacttcacagctggattactcgctcagaagctgtgttgcagagtcctgaatttgcaatctttcggaaggaaggcaacttctcagacttaaaagaaaaagtcaatgccatagagcgagaaaaagctgagaagttcagaaaactgcaagatgccagcagatcagctcaggccctggtggaacagatggtgaatgagggtgttaatgcagatagcatcaaacaagcctcagaacaactgaacagccggtggatcgaattctgccagttgctaagtgagagacttaactggctggagtatcagaacaacatcatcgctttctataatcagctacaacaattggagcagatgacaactactgctgaaaactggttgaaaatccaacccaccaccccatcagagccaacagcaattaaaagtcagttaaaaatttgtaaggatgaagtcaaccggctatcagatcttcaacctcaaattgaacgattaaaaattcaaagcatagccctgaaagagaaaggacaaggacccatgttcctggatgcagactttgtggcctttacaaatcattttaagcaagtcttttctgatgtgcaggccagagagaaagagctacagacaatttttgacactttgccaccaatgcgctatcaggagaccatgagtgccatcaggacatgggtccagcagtcagaaaccaaactctccatacctcaacttagtgtcaccgactatgaaatcatggagcagagactcggggaattgcaggctttacaaagttctctgcaagagcaacaaagtggcctatactatctcagcaccactgtgaaagagatgtcgaagaaagcgccctctgaaattagccggaaatatcaatcagaatttgaagaaattgagggacgctggaagaagctctcctcccagctggttgagcattgtcaaaagctagaggagcaaatgaataaactccgaaaaattcagaatcacatacaaaccctgaagaaatggatggctgaagttgatgtttttctgaaggaggaatggcctgcccttggggattcagaaattctaaaaaagcagctgaaacagtgcagacttttagtcagtgatattcagacaattcagcccagtctaaacagtgtcaatgaaggtgggcagaagataaagaatgaagcagagccagagtttgcttcgagacttgagacagaactcaaagaacttaacactcagtgggatcacatgtgccaacaggtctatgccagaaaggaggccttgaagggaggtttggagaaaactgtaagcctccagaaagatctatcagagatgcacgaatggatgacacaagctgaagaagagtatcttgagagagattttgaatataaaactccagatgaattacagaaagcagttgaagagatgaagagagctaaagaagaggcccaacaaaaagaagcgaaagtgaaactccttactgagtctgtaaatagtgtcatagctcaagctccacctgtagcacaagaggccttaaaaaaggaacttgaaactctaaccaccaactaccagtggctctgcactaggctgaatgggaaatgcaagactttggaagaagtttgggcatgttggcatgagttattgtcatacttggagaaagcaaacaagtggctaaatgaagtagaatttaaacttaaaaccactgaaaacattcctggcggagctgaggaaatctctgaggtgctagattcacttgaaaatttgatgcgacattcagaggataacccaaatcagattcgcatattggcacagaccctaacagatggcggagtcatggatgagctaatcaatgaggaacttgagacatttaattctcgttggagggaactacatgaagaggctgtaaggaggcaaaagttgcttgaacagagcatccagtctgcccaggagactgaaaaatccttacacttaatccaggagtccctcacattcattgacaagcagttggcagcttatattgcagacaaggtggacgcagctcaaatgcctcaggaagcccagaaaatccaatctgatttgacaagtcatgagatcagtttagaagaaatgaagaaacataatcaggggaaggaggctgcccaaagagtcctgtctcagattgatgttgcacagaaaaaattacaagatgtctccatgaagtttcgattattccagaaaccagccaattttgagcagcgtctacaagaaagtaagatgattttagatgaagtgaagatgcacttgcctgcattggaaacaaagagtgtggaacaggaagtagtacagtcacagctaaatcattgtgtgaacttgtataaaagtctgagtgaagtgaagtctgaagtggaaatggtgataaagactggacgtcagattgtacagaaaaagcagacggaaaatcccaaagaacttgatgaaagagtaacagctttgaaattgcattataatgagctgggagcaaaggtaacagaaagaaagcaacagttggagaaatgcttgaaattgtcccgtaagatgcgaaaggaaatgaatgtcttgacagaatggctggcagctacagatatggaattgacaaagagatcagcagttgaaggaatgcctagtaatttggattctgaagttgcctggggaaaggctactcaaaaagagattgagaaacagaaggtgcacctgaagagtatcacagaggtaggagaggccttgaaaacagttttgggcaagaaggagacgttggtggaagataaactcagtcttctgaatagtaactggatagctgtcacctcccgagcagaagagtggttaaatcttttgttggaataccagaaacacatggaaacttttgaccagaatgtggaccacatcacaaagtggatcattcaggctgacacacttttggatgaatcagagaaaaagaaaccccagcaaaaagaagacgtgcttaagcgtttaaaggcagaactgaatgacatacgcccaaaggtggactctacacgtgaccaagcagcaaacttgatggcaaaccgcggtgaccactgcaggaaattagtagagccccaaatctcagagctcaaccatcgatttgcagccatttcacacagaattaagactggaaaggcctccattcctttgaaggaattggagcagtttaactcagatatacaaaaattgcttgaaccactggaggctgaaattcagcagggggtgaatctgaaagaggaagacttcaataaagatatgaatgaagacaatgagggtactgtaaaagaattgttgcaaagaggagacaacttacaacaaagaatcacagatgagagaaagcgagaggaaataaagataaaacagcagctgttacagacaaaacataatgctctcaaggatttgaggtctcaaagaagaaaaaaggctctagaaatttctcatcagtggtatcagtacaagaggcaggctgatgatctcctgaaatgcttggatgacattgaaaaaaaattagccagcctacctgagcccagagatgaaaggaaaataaaggaaattgatcgggaattgcagaagaagaaagaggagctgaatgcagtgcgtaggcaagctgagggcttgtctgaggatggggccgcaatggcagtggagccaactcagatccagctcagcaagcgctggcgggaaattgagagcaaatttgctcagtttcgaagactcaactttgcacaaattcacactgtccgtgaagaaacgatgatggtgatgactgaagacatgcctttggaaatttcttatgtgccttctacttatttgactgaaatcactcatgtctcacaagccctattagaagtggaacaacttctcaatgctcctgacctctgtgctaaggactttgaagatctctttaagcaagaggagtctctgaagaatataaaagatagtctacaacaaagctcaggtcggattgacattattcatagcaagaagacagcagcattgcaaagtgcaacgcctgtggaaagggtgaagctacaggaagctctctcccagcttgatttccaatgggaaaaagttaacaaaatgtacaaggaccgacaagggcgatttgacagatctgttgagaaatggcggcgttttcattatgatataaagatatttaatcagtggctaacagaagctgaacagtttctcagaaagacacaaattcctgagaattgggaacatgctaaatacaaatggtatcttaaggaactccaggatggcattgggcagcggcaaactgttgtcagaacattgaatgcaactggggaagaaataattcagcaatcctcaaaaacagatgccagtattctacaggaaaaattgggaagcctgaatctgcggtggcaggaggtctgcaaacagctgtcagacagaaaaaagaggctagaagaacaaaagaatatcttgtcagaatttcaaagagatttaaatgaatttgttttatggttggaggaagcagataacattgctagtatcccacttgaacctggaaaagagcagcaactaaaagaaaagcttgagcaagtcaagttactggtggaagagttgcccctgcgccagggaattctcaaacaattaaatgaaactggaggacccgtgcttgtaagtgctcccataagcccagaagagcaagataaacttgaaaataagctcaagcagacaaatctccagtggataaaggtttccagagctttacctgagaaacaaggagaaattgaagctcaaataaaagaccttgggcagcttgaaaaaaagcttgaagaccttgaagagcagttaaatcatctgctgctgtggttatctcctattaggaatcagttggaaatttataaccaaccaaaccaagaaggaccatttgacgttaaggaaactgaaatagcagttcaagctaaacaaccggatgtggaagagattttgtctaaagggcagcatttgtacaaggaaaaaccagccactcagccagtgaagaggaagttagaagatctgagctctgagtggaaggcggtaaaccgtttacttcaagagctgagggcaaagcagcctgacctagctcctggactgaccactattggagcctctcctactcagactgttactctggtgacacaacctgtggttactaaggaaactgccatctccaaactagaaatgccatcttccttgatgttggaggtacctgctctggcagatttcaaccgggcttggacagaacttaccgactggctttctctgcttgatcaagttataaaatcacagagggtgatggtgggtgaccttgaggatatcaacgagatgatcatcaagcagaaggcaacaatgcaggatttggaacagaggcgtccccagttggaagaactcattaccgctgcccaaaatttgaaaaacaagaccagcaatcaagaggctagaacaatcattacggatcgaattgaaagaattcagaatcagtgggatgaagtacaagaacaccttcagaaccggaggcaacagttgaatgaaatgttaaaggattcaacacaatggctggaagctaaggaagaagctgagcaggtcttaggacaggccagagccaagcttgagtcatggaaggagggtccctatacagtagatgcaatccaaaagaaaatcacagaaaccaagcagttggccaaagacctccgccagtggcagacaaatgtagatgtggcaaatgacttggccctgaaacttctccgggattattctgcagatgataccagaaaagtccacatgataacagagaatatcaatgcctcttggagaagcattcataaaagggtgagtgagcgagaggctgctttggaagaaactcatagattactgcaacagttccccctggacctggaaaagtttcttgcctggcttacagaagctgaaacaactgccaatgtcctacaggatgctacccgtaaggaaaggctcctagaagactccaagggagtaaaagagctgatgaaacaatggcaagacctccaaggtgaaattgaagctcacacagatgtttatcacaacctggatgaaaacagccaaaaaatcctgagatccctggaaggttccgatgatgcagtcctgttacaaagacgtttggataacatgaacttcaagtggagtgaacttcggaaaaagtctctcaacattaggtcccatttggaagccagttctgaccagtggaagcgtctgcacctttctctgcaggaacttctggtgtggctacagctgaaagatgatgaattaagccggcaggcacctattggaggcgactttccagcagttcagaagcagaacgatgtacatagggccttcaagagggaattgaaaactaaagaacctgtaatcatgagtactcttgagactgtacgaatatttctgacagagcagcctttggaaggactagagaaactctaccaggagcccagagagctgcctcctgaggagagagcccagaatgtcactcggcttctacgaaagcaggctgaggaggtcaatactgagtgggaaaaattgaacctgcactccgctgactggcagagaaaaatagatgagacccttgaaagactccgggaacttcaagaggccacggatgagctggacctcaagctgcgccaagctgaggtgatcaagggatcctggcagcccgtgggcgatctcctcattgactctctccaagatcacctcgagaaagtcaaggcacttcgaggagaaattgcgcctctgaaagagaacgtgagccacgtcaatgaccttgctcgccagcttaccactttgggcattcagctctcaccgtataacctcagcactctggaagacctgaacaccagatggaagcttctgcaggtggccgtcgaggaccgagtcaggcagctgcatgaagcccacagggactttggtccagcatctcagcactttctttccacgtctgtccagggtccctgggagagagccatctcgccaaacaaagtgccctactatatcaaccacgagactcaaacaacttgctgggaccatcccaaaatgacagagctctaccagtctttagctgacctgaataatgtcagattctcagcttataggactgccatgaaactccgaagactgcagaaggccctttgcttggatctcttgagcctgtcagctgcatgtgatgccttggaccagcacaacctcaagcaaaatgaccagcccatggatatcctgcagattattaattgtttgaccactatttatgaccgcctggagcaagagcacaacaatttggtcaacgtccctctctgcgtggatatgtgtctgaactggctgctgaatgtttatgatacgggacgaacagggaggatccgtgtcctgtcttttaaaactggcatcatttccctgtgtaaagcacatttggaagacaagtacagataccttttcaagcaagtggcaagttcaacaggattttgtgaccagcgcaggctgggcctccttctgcatgattctatccaaattccaagacagttgggtgaagttgcatcctttgggggcagtaacattgagccaagtgtccggagctgcttccaatttgctaataataagccagagatcgaagcggccctcttcctagactggatgagactggaaccccagtccatggtgtggctgcccgtcctgcacagagtggctgctgcagaaactgccaagcatcaggccaaatgtaacatctgcaaagagtgtccaatcattggattcaggtacaggagtctaaagcactttaattatgacatctgccaaagctgctttttttctggtcgagttgcaaaaggccataaaatgcactatcccatggtggaatattgcactccgactacatcaggagaagatgttcgagactttgccaaggtactaaaaaacaaatttcgaaccaaaaggtattttgcgaagcatccccgaatgggctacctgccagtgcagactgtcttagagggggacaacatggaaactcccgttactctgatcaacttctggccagtagattctgcgcctgcctcgtcccctcagctttcacacgatgatactcattcacgcattgaacattatgctagcaggctagcagaaatggaaaacagcaatggatcttatctaaatgatagcatctctcctaatgagagcatagatgatgaacatttgttaatccagcattactgccaaagtttgaaccaggactcccccctgagccagcctcgtagtcctgcccagatcttgatttccttagagagtgaggaaagaggggagctagagagaatcctagcagatcttgaggaagaaaacaggaatctgcaagcagaatatgaccgtctaaagcagcagcacgaacataaaggcctgtccccactgccgtcccctcctgaaatgatgcccacctctccccagagtccccgggatgctgagctcattgctgaggccaagctactgcgtcaacacaaaggccgcctggaagccaggatgcaaatcctggaagaccacaataaacagctggagtcacagttacacaggctaaggcagctgctggagcaaccccaggcagaggccaaagtgaatggcacaacggtgtcctctccttctacctctctacagaggtccgacagcagtcagcctatgctgctccgagtggttggcagtcaaacttcggactccatgggtgaggaagatcttctcagtcctccccaggacacaagcacagggttagaggaggtgatggagcaactcaacaactccttccctagttcaagaggacacaatgtaggaagtcttttccacatggcagatgatttgggcagagcgatggagtccttagtatcagtcatgacagatgaagaaggagcagaataaatgttttacaactcctgattcccgcatggtttttataatattcatacaacaaagaggattagacagtaagagtttacaagaaataaatctatatttttgtgaagggtagtggtattatactgtagatttcagtagtttctaagtctgttattgttttgttaacaatggcaggttttacacgtctatgcaattgtacaaaaaagttataagaaaactacatgtaaaatcttgatagctaaataacttgccatttctttatatggaacgcattttgggttgtttaaaaatttataacagttataaagaaagattgtaaactaaagtgtgctttataaaaaaaagttgtttataaaaacccctaaaaacaaaacaaacacacacacacacacatacacacacacacacaaaactttgaggcagcgcattgttttgcatccttttggcgtgatatccatatgaaattcatggctttttctttttttgcatattaaagataagacttcctctaccaccacaccaaatgactactacacactgctcatttgagaactgtcagctgagtggggcaggcttgagttttcatttcatatatctatatgtctataagtatataaatactatagttatatagataaagagatacgaatttctatagactgactttttccattttttaaatgttcatgtcacatcctaatagaaagaaattacttctagtcagtcatccaggcttacctgcttggtctagaatggatttttcccggagccggaagccaggaggaaactacaccacactaaaacattgtctacagctccagatgtttctcattttaaacaactttccactgacaacgaaagtaaagtaaagtattggatttttttaaagggaacatgtgaatgaatacacaggacttattatatcagagtgagtaatcggttggttggttgattgattgattgattgatacattcagcttcctgctgctagcaatgccacgatttagatttaatgatgcttcagtggaaatcaatcagaaggtattctgaccttgtgaacatcagaaggtattttttaactcccaagcagtagcaggacgatgatagggctggagggctatggattcccagcccatccctgtgaaggagtaggccactctttaagtgaaggattggatgattgttcataatacataaagttctctgtaattacaactaaattattatgccctcttctcacagtcaaaaggaactgggtggtttggtttttgttgcttttttagatttattgtcccatgtgggatgagtttttaaatgccacaagacataatttaaaataaataaactttgggaaaaggtgtaaaacagtagccccatcacatttgtgatactgacaggtatcaacccagaagcccatgaactgtgtttccatcctttgcatttctctgcgagtagttccacacaggtttgtaagtaagtaagaaagaaggcaaattgattcaaatgttacaaaaaaacccttcttggtggattagacaggttaaatatataaacaaacaaacaaaaattgctcaaaaaagaggagaaaagctcaagaggaaaagctaaggactggtaggaaaaagctttactctttcatgccattttatttctttttgatttttaaatcattcattcaatagataccaccgtgtgacctataattttgcaaatctgttacctctgacatcaagtgtaattagcttttggagagtgggctgacatcaagtgtaattagcttttggagagtgggttttgtccattattaataattaattaattaacatcaaacacggcttctcatgctatttctacctcactttggttttggggtgttcctgataattgtgcacacctgagttcacagcttcaccacttgtccattgcgttattttctttttcctttataattctttctttttccttcataattttcaaaagaaaacccaaagctctaaggtaacaaattaccaaattacatgaagatttggtttttgtcttgcatttttttcctttatgtgacgctggaccttttctttacccaaggatttttaaaactcagatttaaaacaaggggttactttacatcctactaagaagtttaagtaagtaagtttcattctaaaatcagaggtaaatagagtgcataaataattttgttttaatctttttgtttttcttttagacacattagctctggagtgagtctgtcataatatttgaacaaaaattgagagctttattgctgcattttaagcataattaatttggacattatttcgtgttgtgttctttataaccaccaagtattaaactgtaaatcataatgtaactgaagcataaacatcacatggcatgttttgtcattgttttcaggtactgagttcttacttgagtatcataatatattgtgttttaacaccaacactgtaacatttacgaattatttttttaaacttcagttttactgcattttcacaacatatcagacttcaccaaatatatgccttactattgtattatagtactgctttactgtgtatctcaataaagcacgcagttatgttacaaaaaagta

SEQ ID NO: 417 - protein, 3695 aa, Homo sapiens
MEDEREDVQKKTFTKWVNAQFSKFGKQHIENLFSDLQDGRRLLDLLEGLTGQKLPKEKGSTRVHALNNVNKALRVLQNNNVDLVNIGSTDIVDGNHKLTLGLIWNIILHWQVKNVMKNIMAGLQQTNSEKILLSWVRQSTRNYPQVNVINFTTSWSDGLALNALIHSHRPDLFDWNSVVCQQSATQRLEHAFNIARYQLGIEKLLDPEDVDTTYPDKKSILMYITSLFQVLPQQVSIEAIQEVEMLPRPPKVTKEEHFQLHHQMHYSQQITVSLAQGYERTSSPKPRFKSYAYTQAAYVTTSDPTRSPFPSQHLEAPEDKSFGSSLMESEVNLDRYQTALEEVLSWLLSAEDTLQAQGEISNDVEVVKDQFHTHEGYMMDLTAHQGRVGNILQLGSKLIGTGKLSEDEETEVQEQMNLLNSRWECLRVASMEKQSNLHRVLMDLQNQKLKELNDWLTKTEERTRKMEEEPLGPDLEDLKRQVQQHKVLQEDLEQEQVRVNSLTHMVVVVDESSGDHATAALEEQLKVLGDRWANICRWTEDRWVLLQDILLKWQRLTEEQCLFSAWLSEKEDAVNKIHTTGFKDQNEMLSSLQKLAVLKADLEKKKQSMGKLYSLKQDLLSTLKNKSVTQKTEAWLDNFARCWDNLVQKLEKSTAQISQAVTTTQPSLTQTTVMETVTTVTTREQILVKHAQEELPPPPPQKKRQITVDSEIRKRLDVDITELHSWITRSEAVLQSPEFAIFRKEGNFSDLKEKVNAIEREKAEKFRKLQDASRSAQALVEQMVNEGVNADSIKQASEQLNSRWIEFCQLLSERLNWLEYQNNIIAFYNQLQQLEQMTTTAENWLKIQPTTPSEPTAIKSQLKICKDEVNRLSDLQPQIERLKIQSIALKEKGQGPMFLDADFVAFTNHFKQVFSDVQAREKELQTIFDTLPPMRYQETMSAIRTWVQQSETKLSIPQLSVTDYEIMEQRLGELQALQSSLQEQQSGLYYLSTTVKEMSKKAPSEISRKYQSEFEEIEGRWKKLSSQLVEHCQKLEEQMNKLRKIQNHIQTLKKWMAEVDVFLKEEWPALGDSEILKKQLKQCRLLVSDIQTIQPSLNSVNEGGQKIKNEAEPEFASRLETELKELNTQWDHMCQQVYARKEALKGGLEKTVSLQKDLSEMHEWMTQAEEEYLERDFEYKTPDELQKAVEEMKRAKEEAQQKEAKVKLLTESVNSVIAQAPPVAQEALKKELETLTTNYQWLCTRLNGKCKTLEEVWACWHELLSYLEKANKWLNEVEFKLKTTENIPGGAEEISEVLDSLENLMRHSEDNPNQIRILAQTLTDGGVMDELINEELETFNSRWRELHEEAVRRQKLLEQSIQSAQETEKSLHLIQESLTFIDKQLAAYIADKVDAAQMPQEAQKIQSDLTSHEISLEEMKKHNQGKEAAQRVLSQIDVAQKKLQDVSMKFRLFQKPANFEQRLQESKMILDEVKMHLPALETKSVEQEVVQSQLNHCVNLYKSLSEVKSEVEMVIKTGRQIVQKKQTENPKELDERVTALKLHYNELGAKVTERKQQLEKCLKLSRKMRKEMNVLTEWLAATDMELTKRSAVEGMPSNLDSEVAWGKATQKEIEKQKVHLKSITEVGEALKTVLGKKETLVEDKLSLLNSNWIAVTSRAEEWLNLLLEYQKHMETFDQNVDHITKWIIQADTLLDESEKKKPQQKEDVLKRLKAELNDIRPKVDSTRDQAANLMANRGDHCRKLVEPQISELNHRFAAISHRIKTGKASIPLKELEQFNSDIQKLLEPLEAEIQQGVNLKEEDFNKDMNEDNEGTVKELLQRGDNLQQRITDERKREEIKIKQQLLQTKHNALKDLRSQRRKKALEISHQWYQYKRQADDLLKCLDDIEKKLASLPEPRDERKIKEIDRELQKKKEELNAVRRQAEGLSEDGAAMAVEPTQIQLSKRWREIESKFAQFRRLNFAQIHTVREETMMVMTEDMPLEISYVPSTYLTEITHVSQALLEVEQLLNAPDLCAKDFEDLFKQEESLKNIKDSLQQSSGRIDIIHSKKTAALQSATPVERVKLQEALSQLDFQWEKVNKMYKDRQGRFDRSVEKWRRFHYDIKIFNQWLTEAEQFLRKTQIPENWEHAKYKWYLKELQDGIGQRQTVVRTLNATGEEIIQQSSKTDASILQEKLGSLNLRWQEVCKQLSDRKKRLEEQKNILSEFQRDLNEFVLWLEEADNIASIPLEPGKEQQLKEKLEQVKLLVEELPLRQGILKQLNETGGPVLVSAPISPEEQDKLENKLKQTNLQWIKVSRALPEKQGEIEAQIKDLGQLEKKLEDLEEQLNHLLLWLSPIRNQLEIYNQPNQEGPFDVKETEIAVQAKQPDVEEILSKGQHLYKEKPATQPVKRKLEDLSSEWKAVNRLLQELRAKQPDLAPGLTTIGASPTQTVTLVTQPVVTKETAISKLEMPSSLMLEVPALADFNRAWTELTDWLSLLDQVIKSQRVMVGDLEDINEMIIKQKATMQDLEQRRPQLEELITAAQNLKNKTSNQEARTIITDRIERIQNQWDEVQEHLQNRRQQLNEMLKDSTQWLEAKEEAEQVLGQARAKLESWKEGPYTVDAIQKKITETKQLAKDLRQWQTNVDVANDLALKLLRDYSADDTRKVHMITENINASWRSIHKRVSEREAALEETHRLLQQFPLDLEKFLAWLTEAETTANVLQDATRKERLLEDSKGVKELMKQWQDLQGEIEAHTDVYHNLDENSQKILRSLEGSDDAVLLQRRLDNMNFKWSELRKKSLNIRSHLEASSDQWKRLHLSLQELLVWLQLKDDELSRQAPIGGDFPAVQKQNDVHRAFKRELKTKEPVIMSTLETVRIFLTEQPLEGLEKLYQEPRELPPEERAQNVTRLLRKQAEEVNTEWEKLNLHSADWQRKIDETLERLRELQEATDELDLKLRQAEVIKGSWQPVGDLLIDSLQDHLEKVKALRGEIAPLKENVSHVNDLARQLTTLGIQLSPYNLSTLEDLNTRWKLLQVAVEDRVRQLHEAHRDFGPASQHFLSTSVQGPWERAISPNKVPYYINHETQTTCWDHPKMTELYQSLADLNNVRFSAYRTAMKLRRLQKALCLDLLSLSAACDALDQHNLKQNDQPMDILQIINCLTTIYDRLEQEHNNLVNVPLCVDMCLNWLLNVYDTGRTGRIRVLSFKTGIISLCKAHLEDKYRYLFKQVASSTGFCDQRRLGLLLHDSIQIPRQLGEVASFGGSNIEPSVRSCFQFANNKPEIEAALFLDWMRLEPQSMVWLPVLHRVAAAETAKHQAKCNICKECPIIGFRYRSLKHFNYDICQSCFFSGRVAKGHKMHYPMVEYCTPTTSGEDVRDFAKVLKNKFRTKRYFAKHPRMGYLPVQTVLEGDNMETPVTLINFWPVDSAPASSPQLSHDDTHSRIEHYASRLAEMENSNGSYLNDSISPNESIDDEHLLIQHYCQSLNQDSPLSQPRSPAQILISLESEERGELERILADLEEENRNLQAEYDRLKQQHEHKGLSPLPSPPEMMPTSPQSPRDAELIAEAKLLRQHKGRLEARMQILEDHNKQLESQLHRLRQLLEQPQAEAKVNGTTVSSPSTSLQRSDSSQPMLLRVVGSQTSDSMGEEDLLSPPQDTSTGLEEVMEQLNNSFPSSRGHNVGSLFHMADDLGRAMESLVSVMTDEEGAE

SEQ ID NO: 418 - DNA, 13800 bp, Homo sapiens
actttccccctacaggactcagatctgggaggcaattaccttcggagaaaaacgaataggaaaaactgaagtgttactttttttaaagctgctgaagtttgttggtttctcattgtttttaagcctactggagcaataaagtttgaagaacttttaccaggttttttttatcgctgccttgatatacacttttcaaaatgctttggtgggaagaagtagaggactgttatgaaagagaagatgttcaaaagaaaacattcacaaaatgggtaaatgcacaattttctaagtttgggaagcagcatattgagaacctcttcagtgacctacaggatgggaggcgcctcctagacctcctcgaaggcctgacagggcaaaaactgccaaaagaaaaaggatccacaagagttcatgccctgaacaatgtcaacaaggcactgcgggttttgcagaacaataatgttgatttagtgaatattggaagtactgacatcgtagatggaaatcataaactgactcttggtttgatttggaatataatcctccactggcaggtcaaaaatgtaatgaaaaatatcatggctggattgcaacaaaccaacagtgaaaagattctcctgagctgggtccgacaatcaactcgtaattatccacaggttaatgtaatcaacttcaccaccagctggtctgatggcctggctttgaatgctctcatccatagtcataggccagacctatttgactggaatagtgtggtttgccagcagtcagccacacaacgactggaacatgcattcaacatcgccagatatcaattaggcatagagaaactactcgatcctgaagatgttgataccacctatccagataagaagtccatcttaatgtacatcacatcactcttccaagttttgcctcaacaagtgagcattgaagccatccaggaagtggaaatgttgccaaggccacctaaagtgactaaagaagaacattttcagttacatcatcaaatgcactattctcaacagatcacggtcagtctagcacagggatatgagagaacttcttcccctaagcctcgattcaagagctatgcctacacacaggctgcttatgtcaccacctctgaccctacacggagcccatttccttcacagcatttggaagctcctgaagacaagtcatttggcagttcattgatggagagtgaagtaaacctggaccgttatcaaacagctttagaagaagtattatcgtggcttctttctgctgaggacacattgcaagcacaaggagagatttctaatgatgtggaagtggtgaaagaccagtttcatactcatgaggggtacatgatggatttgacagcccatcagggccgggttggtaatattctacaattgggaagtaagctgattggaacaggaaaattatcagaagatgaagaaactgaagtacaagagcagatgaatctcctaaattcaagatgggaatgcctcagggtagctagcatggaaaaacaaagcaatttacatagagttttaatggatctccagaatcagaaactgaaagagttgaatgactggctaacaaaaacagaagaaagaacaaggaaaatggaggaagagcctcttggacctgatcttgaagacctaaaacgccaagtacaacaacataaggtgcttcaagaagatctagaacaagaacaagtcagggtcaattctctcactcacatggtggtggtagttgatgaatctagtggagatcacgcaactgctgctttggaagaacaacttaaggtattgggagatcgatgggcaaacatctgtagatggacagaagaccgctgggttcttttacaagacatccttctcaaatggcaacgtcttactgaagaacagtgcctttttagtgcatggctttcagaaaaagaagatgcagtgaacaagattcacacaactggctttaaagatcaaaatgaaatgttatcaagtcttcaaaaactggccgttttaaaagcggatctagaaaagaaaaagcaatccatgggcaaactgtattcactcaaacaagatcttctttcaacactgaagaataagtcagtgacccagaagacggaagcatggctggataactttgcccggtgttgggataatttagtccaaaaacttgaaaagagtacagcacagatttcacaggctgtcaccaccactcagccatcactaacacagacaactgtaatggaaacagtaactacggtgaccacaagggaacagatcctggtaaagcatgctcaagaggaacttccaccaccacctccccaaaagaagaggcagattactgtggattctgaaattaggaaaaggttggatgttgatataactgaacttcacagctggattactcgctcagaagctgtgttgcagagtcctgaatttgcaatctttcggaaggaaggcaacttctcagacttaaaagaaaaagtcaatgccatagagcgagaaaaagctgagaagttcagaaaactgcaagatgccagcagatcagctcaggccctggtggaacagatggtgaatgagggtgttaatgcagatagcatcaaacaagcctcagaacaactgaacagccggtggatcgaattctgccagttgctaagtgagagacttaactggctggagtatcagaacaacatcatcgctttctataatcagctacaacaattggagcagatgacaactactgctgaaaactggttgaaaatccaacccaccaccccatcagagccaacagcaattaaaagtcagttaaaaatttgtaaggatgaagtcaaccggctatcagatcttcaacctcaaattgaacgattaaaaattcaaagcatagccctgaaagagaaaggacaaggacccatgttcctggatgcagactttgtggcctttacaaatcattttaagcaagtcttttctgatgtgcaggccagagagaaagagctacagacaatttttgacactttgccaccaatgcgctatcaggagaccatgagtgccatcaggacatgggtccagcagtcagaaaccaaactctccatacctcaacttagtgtcaccgactatgaaatcatggagcagagactcggggaattgcaggctttacaaagttctctgcaagagcaacaaagtggcctatactatctcagcaccactgtgaaagagatgtcgaagaaagcgccctctgaaattagccggaaatatcaatcagaatttgaagaaattgagggacgctggaagaagctctcctcccagctggttgagcattgtcaaaagctagaggagcaaatgaataaactccgaaaaattcagaatcacatacaaaccctgaagaaatggatggctgaagttgatgtttttctgaaggaggaatggcctgcccttggggattcagaaattctaaaaaagcagctgaaacagtgcagacttttagtcagtgatattcagacaattcagcccagtctaaacagtgtcaatgaaggtgggcagaagataaagaatgaagcagagccagagtttgcttcgagacttgagacagaactcaaagaacttaacactcagtgggatcacatgtgccaacaggtctatgccagaaaggaggccttgaagggaggtttggagaaaactgtaagcctccagaaagatctatcagagatgcacgaatggatgacacaagctgaagaagagtatcttgagagagattttgaatataaaactccagatgaattacagaaagcagttgaagagatgaagagagctaaagaagaggcccaacaaaaagaagcgaaagtgaaactccttactgagtctgtaaatagtgtcatagctcaagctccacctgtagcacaagaggccttaaaaaaggaacttgaaactctaaccaccaactaccagtggctctgcactaggctgaatgggaaatgcaagactttggaagaagtttgggcatgttggcatgagttattgtcatacttggagaaagcaaacaagtggctaaatgaagtagaatttaaacttaaaaccactgaaaacattcctggcggagctgaggaaatctctgaggtgctagattcacttgaaaatttgatgcgacattcagaggataacccaaatcagattcgcatattggcacagaccctaacagatggcggagtcatggatgagctaatcaatgaggaacttgagacatttaattctcgttggagggaactacatgaagaggctgtaaggaggcaaaagttgcttgaacagagcatccagtctgcccaggagactgaaaaatccttacacttaatccaggagtccctcacattcattgacaagcagttggcagcttatattgcagacaaggtggacgcagctcaaatgcctcaggaagcccagaaaatccaatctgatttgacaagtcatgagatcagtttagaagaaatgaagaaacataatcaggggaaggaggctgcccaaagagtcctgtctcagattgatgttgcacagaaaaaattacaagatgtctccatgaagtttcgattattccagaaaccagccaattttgagcagcgtctacaagaaagtaagatgattttagatgaagtgaagatgcacttgcctgcattggaaacaaagagtgtggaacaggaagtagtacagtcacagctaaatcattgtgtgaacttgtataaaagtctgagtgaagtgaagtctgaagtggaaatggtgataaagactggacgtcagattgtacagaaaaagcagacggaaaatcccaaagaacttgatgaaagagtaacagctttgaaattgcattataatgagctgggagcaaaggtaacagaaagaaagcaacagttggagaaatgcttgaaattgtcccgtaagatgcgaaaggaaatgaatgtcttgacagaatggctggcagctacagatatggaattgacaaagagatcagcagttgaaggaatgcctagtaatttggattctgaagttgcctggggaaaggctactcaaaaagagattgagaaacagaaggtgcacctgaagagtatcacagaggtaggagaggccttgaaaacagttttgggcaagaaggagacgttggtggaagataaactcagtcttctgaatagtaactggatagctgtcacctcccgagcagaagagtggttaaatcttttgttggaataccagaaacacatggaaacttttgaccagaatgtggaccacatcacaaagtggatcattcaggctgacacacttttggatgaatcagagaaaaagaaaccccagcaaaaagaagacgtgcttaagcgtttaaaggcagaactgaatgacatacgcccaaaggtggactctacacgtgaccaagcagcaaacttgatggcaaaccgcggtgaccactgcaggaaattagtagagccccaaatctcagagctcaaccatcgatttgcagccatttcacacagaattaagactggaaagaatgaagacaatgagggtactgtaaaagaattgttgcaaagaggagacaacttacaacaaagaatcacagatgagagaaagcgagaggaaataaagataaaacagcagctgttacagacaaaacataatgctctcaaggatttgaggtctcaaagaagaaaaaaggctctagaaatttctcatcagtggtatcagtacaagaggcaggctgatgatctcctgaaatgcttggatgacattgaaaaaaaattagccagcctacctgagcccagagatgaaaggaaaataaaggaaattgatcgggaattgcagaagaagaaagaggagctgaatgcagtgcgtaggcaagctgagggcttgtctgaggatggggccgcaatggcagtggagccaactcagatccagctcagcaagcgctggcgggaaattgagagcaaatttgctcagtttcgaagactcaactttgcacaaattcacactgtccgtgaagaaacgatgatggtgatgactgaagacatgcctttggaaatttcttatgtgccttctacttatttgactgaaatcactcatgtctcacaagccctattagaagtggaacaacttctcaatgctcctgacctctgtgctaaggactttgaagatctctttaagcaagaggagtctctgaagaatataaaagatagtctacaacaaagctcaggtcggattgacattattcatagcaagaagacagcagcattgcaaagtgcaacgcctgtggaaagggtgaagctacaggaagctctctcccagcttgatttccaatgggaaaaagttaacaaaatgtacaaggaccgacaagggcgatttgacagatctgttgagaaatggcggcgttttcattatgatataaagatatttaatcagtggctaacagaagctgaacagtttctcagaaagacacaaattcctgagaattgggaacatgctaaatacaaatggtatcttaaggaactccaggatggcattgggcagcggcaaactgttgtcagaacattgaatgcaactggggaagaaataattcagcaatcctcaaaaacagatgccagtattctacaggaaaaattgggaagcctgaatctgcggtggcaggaggtctgcaaacagctgtcagacagaaaaaagaggctagaagaacaaaagaatatcttgtcagaatttcaaagagatttaaatgaatttgttttatggttggaggaagcagataacattgctagtatcccacttgaacctggaaaagagcagcaactaaaagaaaagcttgagcaagtcaagttactggtggaagagttgcccctgcgccagggaattctcaaacaattaaatgaaactggaggacccgtgcttgtaagtgctcccataagcccagaagagcaagataaacttgaaaataagctcaagcagacaaatctccagtggataaaggtttccagagctttacctgagaaacaaggagaaattgaagctcaaataaaagaccttgggcagcttgaaaaaaagcttgaagaccttgaagagcagttaaatcatctgctgctgtggttatctcctattaggaatcagttggaaatttataaccaaccaaaccaagaaggaccatttgacgttaaggaaactgaaatagcagttcaagctaaacaaccggatgtggaagagattttgtctaaagggcagcatttgtacaaggaaaaaccagccactcagccagtgaagaggaagttagaagatctgagctctgagtggaaggcggtaaaccgtttacttcaagagctgagggcaaagcagcctgacctagctcctggactgaccactattggagcctctcctactcagactgttactctggtgacacaacctgtggttactaaggaaactgccatctccaaactagaaatgccatcttccttgatgttggaggtacctgctctggcagatttcaaccgggcttggacagaacttaccgactggctttctctgcttgatcaagttataaaatcacagagggtgatggtgggtgaccttgaggatatcaacgagatgatcatcaagcagaaggcaacaatgcaggatttggaacagaggcgtccccagttggaagaactcattaccgctgcccaaaatttgaaaaacaagaccagcaatcaagaggctagaacaatcattacggatcgaattgaaagaattcagaatcagtgggatgaagtacaagaacaccttcagaaccggaggcaacagttgaatgaaatgttaaaggattcaacacaatggctggaagctaaggaagaagctgagcaggtcttaggacaggccagagccaagcttgagtcatggaaggagggtccctatacagtagatgcaatccaaaagaaaatcacagaaaccaagcagttggccaaagacctccgccagtggcagacaaatgtagatgtggcaaatgacttggccctgaaacttctccgggattattctgcagatgataccagaaaagtccacatgataacagagaatatcaatgcctcttggagaagcattcataaaagggtgagtgagcgagaggctgctttggaagaaactcatagattactgcaacagttccccctggacctggaaaagtttcttgcctggcttacagaagctgaaacaactgccaatgtcctacaggatgctacccgtaaggaaaggctcctagaagactccaagggagtaaaagagctgatgaaacaatggcaagacctccaaggtgaaattgaagctcacacagatgtttatcacaacctggatgaaaacagccaaaaaatcctgagatccctggaaggttccgatgatgcagtcctgttacaaagacgtttggataacatgaacttcaagtggagtgaacttcggaaaaagtctctcaacattaggtcccatttggaagccagttctgaccagtggaagcgtctgcacctttctctgcaggaacttctggtgtggctacagctgaaagatgatgaattaagccggcaggcacctattggaggcgactttccagcagttcagaagcagaacgatgtacatagggccttcaagagggaattgaaaactaaagaacctgtaatcatgagtactcttgagactgtacgaatatttctgacagagcagcctttggaaggactagagaaactctaccaggagcccagagagctgcctcctgaggagagagcccagaatgtcactcggcttctacgaaagcaggctgaggaggtcaatactgagtgggaaaaattgaacctgcactccgctgactggcagagaaaaatagatgagacccttgaaagactccgggaacttcaagaggccacggatgagctggacctcaagctgcgccaagctgaggtgatcaagggatcctggcagcccgtgggcgatctcctcattgactctctccaagatcacctcgagaaagtcaaggcacttcgaggagaaattgcgcctctgaaagagaacgtgagccacgtcaatgaccttgctcgccagcttaccactttgggcattcagctctcaccgtataacctcagcactctggaagacctgaacaccagatggaagcttctgcaggtggccgtcgaggaccgagtcaggcagctgcatgaagcccacagggactttggtccagcatctcagcactttctttccacgtctgtccagggtccctgggagagagccatctcgccaaacaaagtgccctactatatcaaccacgagactcaaacaacttgctgggaccatcccaaaatgacagagctctaccagtctttagctgacctgaataatgtcagattctcagcttataggactgccatgaaactccgaagactgcagaaggccctttgcttggatctcttgagcctgtcagctgcatgtgatgccttggaccagcacaacctcaagcaaaatgaccagcccatggatatcctgcagattattaattgtttgaccactatttatgaccgcctggagcaagagcacaacaatttggtcaacgtccctctctgcgtggatatgtgtctgaactggctgctgaatgtttatgatacgggacgaacagggaggatccgtgtcctgtcttttaaaactggcatcatttccctgtgtaaagcacatttggaagacaagtacagataccttttcaagcaagtggcaagttcaacaggattttgtgaccagcgcaggctgggcctccttctgcatgattctatccaaattccaagacagttgggtgaagttgcatcctttgggggcagtaacattgagccaagtgtccggagctgcttccaatttgctaataataagccagagatcgaagcggccctcttcctagactggatgagactggaaccccagtccatggtgtggctgcccgtcctgcacagagtggctgctgcagaaactgccaagcatcaggccaaatgtaacatctgcaaagagtgtccaatcattggattcaggtacaggagtctaaagcactttaattatgacatctgccaaagctgctttttttctggtcgagttgcaaaaggccataaaatgcactatcccatggtggaatattgcactccgactacatcaggagaagatgttcgagactttgccaaggtactaaaaaacaaatttcgaaccaaaaggtattttgcgaagcatccccgaatgggctacctgccagtgcagactgtcttagagggggacaacatggaaactcccgttactctgatcaacttctggccagtagattctgcgcctgcctcgtcccctcagctttcacacgatgatactcattcacgcattgaacattatgctagcaggctagcagaaatggaaaacagcaatggatcttatctaaatgatagcatctctcctaatgagagcatagatgatgaacatttgttaatccagcattactgccaaagtttgaaccaggactcccccctgagccagcctcgtagtcctgcccagatcttgatttccttagagagtgaggaaagaggggagctagagagaatcctagcagatcttgaggaagaaaacaggaatctgcaagcagaatatgaccgtctaaagcagcagcacgaacataaaggcctgtccccactgccgtcccctcctgaaatgatgcccacctctccccagagtccccgggatgctgagctcattgctgaggccaagctactgcgtcaacacaaaggccgcctggaagccaggatgcaaatcctggaagaccacaataaacagctggagtcacagttacacaggctaaggcagctgctggagcaaccccaggcagaggccaaagtgaatggcacaacggtgtcctctccttctacctctctacagaggtccgacagcagtcagcctatgctgctccgagtggttggcagtcaaacttcggactccatgggtgaggaagatcttctcagtcctccccaggacacaagcacagggttagaggaggtgatggagcaactcaacaactccttccctagttcaagaggacacaatgtaggaagtcttttccacatggcagatgatttgggcagagcgatggagtccttagtatcagtcatgacagatgaagaaggagcagaataaatgttttacaactcctgattcccgcatggtttttataatattcatacaacaaagaggattagacagtaagagtttacaagaaataaatctatatttttgtgaagggtagtggtattatactgtagatttcagtagtttctaagtctgttattgttttgttaacaatggcaggttttacacgtctatgcaattgtacaaaaaagttataagaaaactacatgtaaaatcttgatagctaaataacttgccatttctttatatggaacgcattttgggttgtttaaaaatttataacagttataaagaaagattgtaaactaaagtgtgctttataaaaaaaagttgtttataaaaacccctaaaaacaaaacaaacacacacacacacacatacacacacacacacaaaactttgaggcagcgcattgttttgcatccttttggcgtgatatccatatgaaattcatggctttttctttttttgcatattaaagataagacttcctctaccaccacaccaaatgactactacacactgctcatttgagaactgtcagctgagtggggcaggcttgagttttcatttcatatatctatatgtctataagtatataaatactatagttatatagataaagagatacgaatttctatagactgactttttccattttttaaatgttcatgtcacatcctaatagaaagaaattacttctagtcagtcatccaggcttacctgcttggtctagaatggatttttcccggagccggaagccaggaggaaactacaccacactaaaacattgtctacagctccagatgtttctcattttaaacaactttccactgacaacgaaagtaaagtaaagtattggatttttttaaagggaacatgtgaatgaatacacaggacttattatatcagagtgagtaatcggttggttggttgattgattgattgattgatacattcagcttcctgctgctagcaatgccacgatttagatttaatgatgcttcagtggaaatcaatcagaaggtattctgaccttgtgaacatcagaaggtattttttaactcccaagcagtagcaggacgatgatagggctggagggctatggattcccagcccatccctgtgaaggagtaggccactctttaagtgaaggattggatgattgttcataatacataaagttctctgtaattacaactaaattattatgccctcttctcacagtcaaaaggaactgggtggtttggtttttgttgcttttttagatttattgtcccatgtgggatgagtttttaaatgccacaagacataatttaaaataaataaactttgggaaaaggtgtaaaacagtagccccatcacatttgtgatactgacaggtatcaacccagaagcccatgaactgtgtttccatcctttgcatttctctgcgagtagttccacacaggtttgtaagtaagtaagaaagaaggcaaattgattcaaatgttacaaaaaaacccttcttggtggattagacaggttaaatatataaacaaacaaacaaaaattgctcaaaaaagaggagaaaagctcaagaggaaaagctaaggactggtaggaaaaagctttactctttcatgccattttatttctttttgatttttaaatcattcattcaatagataccaccgtgtgacctataattttgcaaatctgttacctctgacatcaagtgtaattagcttttggagagtgggctgacatcaagtgtaattagcttttggagagtgggttttgtccattattaataattaattaattaacatcaaacacggcttctcatgctatttctacctcactttggttttggggtgttcctgataattgtgcacacctgagttcacagcttcaccacttgtccattgcgttattttctttttcctttataattctttctttttccttcataattttcaaaagaaaacccaaagctctaaggtaacaaattaccaaattacatgaagatttggtttttgtcttgcatttttttcctttatgtgacgctggaccttttctttacccaaggatttttaaaactcagatttaaaacaaggggttactttacatcctactaagaagtttaagtaagtaagtttcattctaaaatcagaggtaaatagagtgcataaataattttgttttaatctttttgtttttcttttagacacattagctctggagtgagtctgtcataatatttgaacaaaaattgagagctttattgctgcattttaagcataattaatttggacattatttcgtgttgtgttctttataaccaccaagtattaaactgtaaatcataatgtaactgaagcataaacatcacatggcatgttttgtcattgttttcaggtactgagttcttacttgagtatcataatatattgtgttttaacaccaacactgtaacatttacgaattatttttttaaacttcagttttactgcattttcacaacatatcagacttcaccaaatatatgccttactattgtattatagtactgctttactgtgtatctcaataaagcacgcagttatgttacaaaaaagta

SEQ ID NO: 419 - protein, 3662 aa, Homo sapiens
MLWWEEVEDCYEREDVQKKTFTKWVNAQFSKFGKQHIENLFSDLQDGRRLLDLLEGLTGQKLPKEKGSTRVHALNNVNKALRVLQNNNVDLVNIGSTDIVDGNHKLTLGLIWNIILHWQVKNVMKNIMAGLQQTNSEKILLSWVRQSTRNYPQVNVINFTTSWSDGLALNALIHSHRPDLFDWNSVVCQQSATQRLEHAFNIARYQLGIEKLLDPEDVDTTYPDKKSILMYITSLFQVLPQQVSIEAIQEVEMLPRPPKVTKEEHFQLHHQMHYSQQITVSLAQGYERTSSPKPRFKSYAYTQAAYVTTSDPTRSPFPSQHLEAPEDKSFGSSLMESEVNLDRYQTALEEVLSWLLSAEDTLQAQGEISNDVEVVKDQFHTHEGYMMDLTAHQGRVGNILQLGSKLIGTGKLSEDEETEVQEQMNLLNSRWECLRVASMEKQSNLHRVLMDLQNQKLKELNDWLTKTEERTRKMEEEPLGPDLEDLKRQVQQHKVLQEDLEQEQVRVNSLTHMVVVVDESSGDHATAALEEQLKVLGDRWANICRWTEDRWVLLQDILLKWQRLTEEQCLFSAWLSEKEDAVNKIHTTGFKDQNEMLSSLQKLAVLKADLEKKKQSMGKLYSLKQDLLSTLKNKSVTQKTEAWLDNFARCWDNLVQKLEKSTAQISQAVTTTQPSLTQTTVMETVTTVTTREQILVKHAQEELPPPPPQKKRQITVDSEIRKRLDVDITELHSWITRSEAVLQSPEFAIFRKEGNFSDLKEKVNAIEREKAEKFRKLQDASRSAQALVEQMVNEGVNADSIKQASEQLNSRWIEFCQLLSERLNWLEYQNNIIAFYNQLQQLEQMTTTAENWLKIQPTTPSEPTAIKSQLKICKDEVNRLSDLQPQIERLKIQSIALKEKGQGPMFLDADFVAFTNHFKQVFSDVQAREKELQTIFDTLPPMRYQETMSAIRTWVQQSETKLSIPQLSVTDYEIMEQRLGELQALQSSLQEQQSGLYYLSTTVKEMSKKAPSEISRKYQSEFEEIEGRWKKLSSQLVEHCQKLEEQMNKLRKIQNHIQTLKKWMAEVDVFLKEEWPALGDSEILKKQLKQCRLLVSDIQTIQPSLNSVNEGGQKIKNEAEPEFASRLETELKELNTQWDHMCQQVYARKEALKGGLEKTVSLQKDLSEMHEWMTQAEEEYLERDFEYKTPDELQKAVEEMKRAKEEAQQKEAKVKLLTESVNSVIAQAPPVAQEALKKELETLTTNYQWLCTRLNGKCKTLEEVWACWHELLSYLEKANKWLNEVEFKLKTTENIPGGAEEISEVLDSLENLMRHSEDNPNQIRILAQTLTDGGVMDELINEELETFNSRWRELHEEAVRRQKLLEQSIQSAQETEKSLHLIQESLTFIDKQLAAYIADKVDAAQMPQEAQKIQSDLTSHEISLEEMKKHNQGKEAAQRVLSQIDVAQKKLQDVSMKFRLFQKPANFEQRLQESKMILDEVKMHLPALETKSVEQEVVQSQLNHCVNLYKSLSEVKSEVEMVIKTGRQIVQKKQTENPKELDERVTALKLHYNELGAKVTERKQQLEKCLKLSRKMRKEMNVLTEWLAATDMELTKRSAVEGMPSNLDSEVAWGKATQKEIEKQKVHLKSITEVGEALKTVLGKKETLVEDKLSLLNSNWIAVTSRAEEWLNLLLEYQKHMETFDQNVDHITKWIIQADTLLDESEKKKPQQKEDVLKRLKAELNDIRPKVDSTRDQAANLMANRGDHCRKLVEPQISELNHRFAAISHRIKTGKNEDNEGTVKELLQRGDNLQQRITDERKREEIKIKQQLLQTKHNALKDLRSQRRKKALEISHQWYQYKRQADDLLKCLDDIEKKLASLPEPRDERKIKEIDRELQKKKEELNAVRRQAEGLSEDGAAMAVEPTQIQLSKRWREIESKFAQFRRLNFAQIHTVREETMMVMTEDMPLEISYVPSTYLTEITHVSQALLEVEQLLNAPDLCAKDFEDLFKQEESLKNIKDSLQQSSGRIDIIHSKKTAALQSATPVERVKLQEALSQLDFQWEKVNKMYKDRQGRFDRSVEKWRRFHYDIKIFNQWLTEAEQFLRKTQIPENWEHAKYKWYLKELQDGIGQRQTVVRTLNATGEEIIQQSSKTDASILQEKLGSLNLRWQEVCKQLSDRKKRLEEQKNILSEFQRDLNEFVLWLEEADNIASIPLEPGKEQQLKEKLEQVKLLVEELPLRQGILKQLNETGGPVLVSAPISPEEQDKLENKLKQTNLQWIKVSRALPEKQGEIEAQIKDLGQLEKKLEDLEEQLNHLLLWLSPIRNQLEIYNQPNQEGPFDVKETEIAVQAKQPDVEEILSKGQHLYKEKPATQPVKRKLEDLSSEWKAVNRLLQELRAKQPDLAPGLTTIGASPTQTVTLVTQPVVTKETAISKLEMPSSLMLEVPALADFNRAWTELTDWLSLLDQVIKSQRVMVGDLEDINEMIIKQKATMQDLEQRRPQLEELITAAQNLKNKTSNQEARTIITDRIERIQNQWDEVQEHLQNRRQQLNEMLKDSTQWLEAKEEAEQVLGQARAKLESWKEGPYTVDAIQKKITETKQLAKDLRQWQTNVDVANDLALKLLRDYSADDTRKVHMITENINASWRSIHKRVSEREAALEETHRLLQQFPLDLEKFLAWLTEAETTANVLQDATRKERLLEDSKGVKELMKQWQDLQGEIEAHTDVYHNLDENSQKILRSLEGSDDAVLLQRRLDNMNFKWSELRKKSLNIRSHLEASSDQWKRLHLSLQELLVWLQLKDDELSRQAPIGGDFPAVQKQNDVHRAFKRELKTKEPVIMSTLETVRIFLTEQPLEGLEKLYQEPRELPPEERAQNVTRLLRKQAEEVNTEWEKLNLHSADWQRKIDETLERLRELQEATDELDLKLRQAEVIKGSWQPVGDLLIDSLQDHLEKVKALRGEIAPLKENVSHVNDLARQLTTLGIQLSPYNLSTLEDLNTRWKLLQVAVEDRVRQLHEAHRDFGPASQHFLSTSVQGPWERAISPNKVPYYINHETQTTCWDHPKMTELYQSLADLNNVRFSAYRTAMKLRRLQKALCLDLLSLSAACDALDQHNLKQNDQPMDILQIINCLTTIYDRLEQEHNNLVNVPLCVDMCLNWLLNVYDTGRTGRIRVLSFKTGIISLCKAHLEDKYRYLFKQVASSTGFCDQRRLGLLLHDSIQIPRQLGEVASFGGSNIEPSVRSCFQFANNKPEIEAALFLDWMRLEPQSMVWLPVLHRVAAAETAKHQAKCNICKECPIIGFRYRSLKHFNYDICQSCFFSGRVAKGHKMHYPMVEYCTPTTSGEDVRDFAKVLKNKFRTKRYFAKHPRMGYLPVQTVLEGDNMETPVTLINFWPVDSAPASSPQLSHDDTHSRIEHYASRLAEMENSNGSYLNDSISPNESIDDEHLLIQHYCQSLNQDSPLSQPRSPAQILISLESEERGELERILADLEEENRNLQAEYDRLKQQHEHKGLSPLPSPPEMMPTSPQSPRDAELIAEAKLLRQHKGRLEARMQILEDHNKQLESQLHRLRQLLEQPQAEAKVNGTTVSSPSTSLQRSDSSQPMLLRVVGSQTSDSMGEEDLLSPPQDTSTGLEEVMEQLNNSFPSSRGHNVGSLFHMADDLGRAMESLVSVMTDEEGAE

SEQ ID NO: 420 - DNA, 13785 bp, Homo sapiens
actttccccctacaggactcagatctgggaggcaattaccttcggagaaaaacgaataggaaaaactgaagtgttactttttttaaagctgctgaagtttgttggtttctcattgtttttaagcctactggagcaataaagtttgaagaacttttaccaggttttttttatcgctgccttgatatacacttttcaaaatgctttggtgggaagaagtagaggactgttatgaaagagaagatgttcaaaagaaaacattcacaaaatgggtaaatgcacaattttctaagtttgggaagcagcatattgagaacctcttcagtgacctacaggatgggaggcgcctcctagacctcctcgaaggcctgacagggcaaaaactgccaaaagaaaaaggatccacaagagttcatgccctgaacaatgtcaacaaggcactgcgggttttgcagaacaataatgttgatttagtgaatattggaagtactgacatcgtagatggaaatcataaactgactcttggtttgatttggaatataatcctccactggcaggtcaaaaatgtaatgaaaaatatcatggctggattgcaacaaaccaacagtgaaaagattctcctgagctgggtccgacaatcaactcgtaattatccacaggttaatgtaatcaacttcaccaccagctggtctgatggcctggctttgaatgctctcatccatagtcataggccagacctatttgactggaatagtgtggtttgccagcagtcagccacacaacgactggaacatgcattcaacatcgccagatatcaattaggcatagagaaactactcgatcctgaagatgttgataccacctatccagataagaagtccatcttaatgtacatcacatcactcttccaagttttgcctcaacaagtgagcattgaagccatccaggaagtggaaatgttgccaaggccacctaaagtgactaaagaagaacattttcagttacatcatcaaatgcactattctcaacagatcacggtcagtctagcacagggatatgagagaacttcttcccctaagcctcgattcaagagctatgcctacacacaggctgcttatgtcaccacctctgaccctacacggagcccatttccttcacagcatttggaagctcctgaagacaagtcatttggcagttcattgatggagagtgaagtaaacctggaccgttatcaaacagctttagaagaagtattatcgtggcttctttctgctgaggacacattgcaagcacaaggagagatttctaatgatgtggaagtggtgaaagaccagtttcatactcatgaggggtacatgatggatttgacagcccatcagggccgggttggtaatattctacaattgggaagtaagctgattggaacaggaaaattatcagaagatgaagaaactgaagtacaagagcagatgaatctcctaaattcaagatgggaatgcctcagggtagctagcatggaaaaacaaagcaatttacatagagttttaatggatctccagaatcagaaactgaaagagttgaatgactggctaacaaaaacagaagaaagaacaaggaaaatggaggaagagcctcttggacctgatcttgaagacctaaaacgccaagtacaacaacataaggtgcttcaagaagatctagaacaagaacaagtcagggtcaattctctcactcacatggtggtggtagttgatgaatctagtggagatcacgcaactgctgctttggaagaacaacttaaggtattgggagatcgatgggcaaacatctgtagatggacagaagaccgctgggttcttttacaagacatccttctcaaatggcaacgtcttactgaagaacagtgcctttttagtgcatggctttcagaaaaagaagatgcagtgaacaagattcacacaactggctttaaagatcaaaatgaaatgttatcaagtcttcaaaaactggccgttttaaaagcggatctagaaaagaaaaagcaatccatgggcaaactgtattcactcaaacaagatcttctttcaacactgaagaataagtcagtgacccagaagacggaagcatggctggataactttgcccggtgttgggataatttagtccaaaaacttgaaaagagtacagcacagatttcacaggctgtcaccaccactcagccatcactaacacagacaactgtaatggaaacagtaactacggtgaccacaagggaacagatcctggtaaagcatgctcaagaggaacttccaccaccacctccccaaaagaagaggcagattactgtggattctgaaattaggaaaaggttggatgttgatataactgaacttcacagctggattactcgctcagaagctgtgttgcagagtcctgaatttgcaatctttcggaaggaaggcaacttctcagacttaaaagaaaaagtcaatgccatagagcgagaaaaagctgagaagttcagaaaactgcaagatgccagcagatcagctcaggccctggtggaacagatggtgaatgagggtgttaatgcagatagcatcaaacaagcctcagaacaactgaacagccggtggatcgaattctgccagttgctaagtgagagacttaactggctggagtatcagaacaacatcatcgctttctataatcagctacaacaattggagcagatgacaactactgctgaaaactggttgaaaatccaacccaccaccccatcagagccaacagcaattaaaagtcagttaaaaatttgtaaggatgaagtcaaccggctatcagatcttcaacctcaaattgaacgattaaaaattcaaagcatagccctgaaagagaaaggacaaggacccatgttcctggatgcagactttgtggcctttacaaatcattttaagcaagtcttttctgatgtgcaggccagagagaaagagctacagacaatttttgacactttgccaccaatgcgctatcaggagaccatgagtgccatcaggacatgggtccagcagtcagaaaccaaactctccatacctcaacttagtgtcaccgactatgaaatcatggagcagagactcggggaattgcaggctttacaaagttctctgcaagagcaacaaagtggcctatactatctcagcaccactgtgaaagagatgtcgaagaaagcgccctctgaaattagccggaaatatcaatcagaatttgaagaaattgagggacgctggaagaagctctcctcccagctggttgagcattgtcaaaagctagaggagcaaatgaataaactccgaaaaattcagaatcacatacaaaccctgaagaaatggatggctgaagttgatgtttttctgaaggaggaatggcctgcccttggggattcagaaattctaaaaaagcagctgaaacagtgcagacttttagtcagtgatattcagacaattcagcccagtctaaacagtgtcaatgaaggtgggcagaagataaagaatgaagcagagccagagtttgcttcgagacttgagacagaactcaaagaacttaacactcagtgggatcacatgtgccaacaggtctatgccagaaaggaggccttgaagggaggtttggagaaaactgtaagcctccagaaagatctatcagagatgcacgaatggatgacacaagctgaagaagagtatcttgagagagattttgaatataaaactccagatgaattacagaaagcagttgaagagatgaagagagctaaagaagaggcccaacaaaaagaagcgaaagtgaaactccttactgagtctgtaaatagtgtcatagctcaagctccacctgtagcacaagaggccttaaaaaaggaacttgaaactctaaccaccaactaccagtggctctgcactaggctgaatgggaaatgcaagactttggaagaagtttgggcatgttggcatgagttattgtcatacttggagaaagcaaacaagtggctaaatgaagtagaatttaaacttaaaaccactgaaaacattcctggcggagctgaggaaatctctgaggtgctagattcacttgaaaatttgatgcgacattcagaggataacccaaatcagattcgcatattggcacagaccctaacagatggcggagtcatggatgagctaatcaatgaggaacttgagacatttaattctcgttggagggaactacatgaagaggctgtaaggaggcaaaagttgcttgaacagagcatccagtctgcccaggagactgaaaaatccttacacttaatccaggagtccctcacattcattgacaagcagttggcagcttatattgcagacaaggtggacgcagctcaaatgcctcaggaagcccagaaaatccaatctgatttgacaagtcatgagatcagtttagaagaaatgaagaaacataatcaggggaaggaggctgcccaaagagtcctgtctcagattgatgttgcacagaaaaaattacaagatgtctccatgaagtttcgattattccagaaaccagccaattttgagcagcgtctacaagaaagtaagatgattttagatgaagtgaagatgcacttgcctgcattggaaacaaagagtgtggaacaggaagtagtacagtcacagctaaatcattgtgtgaacttgtataaaagtctgagtgaagtgaagtctgaagtggaaatggtgataaagactggacgtcagattgtacagaaaaagcagacggaaaatcccaaagaacttgatgaaagagtaacagctttgaaattgcattataatgagctgggagcaaaggtaacagaaagaaagcaacagttggagaaatgcttgaaattgtcccgtaagatgcgaaaggaaatgaatgtcttgacagaatggctggcagctacagatatggaattgacaaagagatcagcagttgaaggaatgcctagtaatttggattctgaagttgcctggggaaaggctactcaaaaagagattgagaaacagaaggtgcacctgaagagtatcacagaggtaggagaggccttgaaaacagttttgggcaagaaggagacgttggtggaagataaactcagtcttctgaatagtaactggatagctgtcacctcccgagcagaagagtggttaaatcttttgttggaataccagaaacacatggaaacttttgaccagaatgtggaccacatcacaaagtggatcattcaggctgacacacttttggatgaatcagagaaaaagaaaccccagcaaaaagaagacgtgcttaagcgtttaaaggcagaactgaatgacatacgcccaaaggtggactctacacgtgaccaagcagcaaacttgatggcaaaccgcggtgaccactgcaggaaattagtagagccccaaatctcagagctcaaccatcgatttgcagccatttcacacagaattaagactggaaaggcctccattcctttgaaggaattggagcagtttaactcagatatacaaaaattgcttgaaccactggaggctgaaattcagcagggggtgaatctgaaagaggaagacttcaataaagatatggatttgaggtctcaaagaagaaaaaaggctctagaaatttctcatcagtggtatcagtacaagaggcaggctgatgatctcctgaaatgcttggatgacattgaaaaaaaattagccagcctacctgagcccagagatgaaaggaaaataaaggaaattgatcgggaattgcagaagaagaaagaggagctgaatgcagtgcgtaggcaagctgagggcttgtctgaggatggggccgcaatggcagtggagccaactcagatccagctcagcaagcgctggcgggaaattgagagcaaatttgctcagtttcgaagactcaactttgcacaaattcacactgtccgtgaagaaacgatgatggtgatgactgaagacatgcctttggaaatttcttatgtgccttctacttatttgactgaaatcactcatgtctcacaagccctattagaagtggaacaacttctcaatgctcctgacctctgtgctaaggactttgaagatctctttaagcaagaggagtctctgaagaatataaaagatagtctacaacaaagctcaggtcggattgacattattcatagcaagaagacagcagcattgcaaagtgcaacgcctgtggaaagggtgaagctacaggaagctctctcccagcttgatttccaatgggaaaaagttaacaaaatgtacaaggaccgacaagggcgatttgacagatctgttgagaaatggcggcgttttcattatgatataaagatatttaatcagtggctaacagaagctgaacagtttctcagaaagacacaaattcctgagaattgggaacatgctaaatacaaatggtatcttaaggaactccaggatggcattgggcagcggcaaactgttgtcagaacattgaatgcaactggggaagaaataattcagcaatcctcaaaaacagatgccagtattctacaggaaaaattgggaagcctgaatctgcggtggcaggaggtctgcaaacagctgtcagacagaaaaaagaggctagaagaacaaaagaatatcttgtcagaatttcaaagagatttaaatgaatttgttttatggttggaggaagcagataacattgctagtatcccacttgaacctggaaaagagcagcaactaaaagaaaagcttgagcaagtcaagttactggtggaagagttgcccctgcgccagggaattctcaaacaattaaatgaaactggaggacccgtgcttgtaagtgctcccataagcccagaagagcaagataaacttgaaaataagctcaagcagacaaatctccagtggataaaggtttccagagctttacctgagaaacaaggagaaattgaagctcaaataaaagaccttgggcagcttgaaaaaaagcttgaagaccttgaagagcagttaaatcatctgctgctgtggttatctcctattaggaatcagttggaaatttataaccaaccaaaccaagaaggaccatttgacgttaaggaaactgaaatagcagttcaagctaaacaaccggatgtggaagagattttgtctaaagggcagcatttgtacaaggaaaaaccagccactcagccagtgaagaggaagttagaagatctgagctctgagtggaaggcggtaaaccgtttacttcaagagctgagggcaaagcagcctgacctagctcctggactgaccactattggagcctctcctactcagactgttactctggtgacacaacctgtggttactaaggaaactgccatctccaaactagaaatgccatcttccttgatgttggaggtacctgctctggcagatttcaaccgggcttggacagaacttaccgactggctttctctgcttgatcaagttataaaatcacagagggtgatggtgggtgaccttgaggatatcaacgagatgatcatcaagcagaaggcaacaatgcaggatttggaacagaggcgtccccagttggaagaactcattaccgctgcccaaaatttgaaaaacaagaccagcaatcaagaggctagaacaatcattacggatcgaattgaaagaattcagaatcagtgggatgaagtacaagaacaccttcagaaccggaggcaacagttgaatgaaatgttaaaggattcaacacaatggctggaagctaaggaagaagctgagcaggtcttaggacaggccagagccaagcttgagtcatggaaggagggtccctatacagtagatgcaatccaaaagaaaatcacagaaaccaagcagttggccaaagacctccgccagtggcagacaaatgtagatgtggcaaatgacttggccctgaaacttctccgggattattctgcagatgataccagaaaagtccacatgataacagagaatatcaatgcctcttggagaagcattcataaaagggtgagtgagcgagaggctgctttggaagaaactcatagattactgcaacagttccccctggacctggaaaagtttcttgcctggcttacagaagctgaaacaactgccaatgtcctacaggatgctacccgtaaggaaaggctcctagaagactccaagggagtaaaagagctgatgaaacaatggcaagacctccaaggtgaaattgaagctcacacagatgtttatcacaacctggatgaaaacagccaaaaaatcctgagatccctggaaggttccgatgatgcagtcctgttacaaagacgtttggataacatgaacttcaagtggagtgaacttcggaaaaagtctctcaacattaggtcccatttggaagccagttctgaccagtggaagcgtctgcacctttctctgcaggaacttctggtgtggctacagctgaaagatgatgaattaagccggcaggcacctattggaggcgactttccagcagttcagaagcagaacgatgtacatagggccttcaagagggaattgaaaactaaagaacctgtaatcatgagtactcttgagactgtacgaatatttctgacagagcagcctttggaaggactagagaaactctaccaggagcccagagagctgcctcctgaggagagagcccagaatgtcactcggcttctacgaaagcaggctgaggaggtcaatactgagtgggaaaaattgaacctgcactccgctgactggcagagaaaaatagatgagacccttgaaagactccgggaacttcaagaggccacggatgagctggacctcaagctgcgccaagctgaggtgatcaagggatcctggcagcccgtgggcgatctcctcattgactctctccaagatcacctcgagaaagtcaaggcacttcgaggagaaattgcgcctctgaaagagaacgtgagccacgtcaatgaccttgctcgccagcttaccactttgggcattcagctctcaccgtataacctcagcactctggaagacctgaacaccagatggaagcttctgcaggtggccgtcgaggaccgagtcaggcagctgcatgaagcccacagggactttggtccagcatctcagcactttctttccacgtctgtccagggtccctgggagagagccatctcgccaaacaaagtgccctactatatcaaccacgagactcaaacaacttgctgggaccatcccaaaatgacagagctctaccagtctttagctgacctgaataatgtcagattctcagcttataggactgccatgaaactccgaagactgcagaaggccctttgcttggatctcttgagcctgtcagctgcatgtgatgccttggaccagcacaacctcaagcaaaatgaccagcccatggatatcctgcagattattaattgtttgaccactatttatgaccgcctggagcaagagcacaacaatttggtcaacgtccctctctgcgtggatatgtgtctgaactggctgctgaatgtttatgatacgggacgaacagggaggatccgtgtcctgtcttttaaaactggcatcatttccctgtgtaaagcacatttggaagacaagtacagataccttttcaagcaagtggcaagttcaacaggattttgtgaccagcgcaggctgggcctccttctgcatgattctatccaaattccaagacagttgggtgaagttgcatcctttgggggcagtaacattgagccaagtgtccggagctgcttccaatttgctaataataagccagagatcgaagcggccctcttcctagactggatgagactggaaccccagtccatggtgtggctgcccgtcctgcacagagtggctgctgcagaaactgccaagcatcaggccaaatgtaacatctgcaaagagtgtccaatcattggattcaggtacaggagtctaaagcactttaattatgacatctgccaaagctgctttttttctggtcgagttgcaaaaggccataaaatgcactatcccatggtggaatattgcactccgactacatcaggagaagatgttcgagactttgccaaggtactaaaaaacaaatttcgaaccaaaaggtattttgcgaagcatccccgaatgggctacctgccagtgcagactgtcttagagggggacaacatggaaactcccgttactctgatcaacttctggccagtagattctgcgcctgcctcgtcccctcagctttcacacgatgatactcattcacgcattgaacattatgctagcaggctagcagaaatggaaaacagcaatggatcttatctaaatgatagcatctctcctaatgagagcatagatgatgaacatttgttaatccagcattactgccaaagtttgaaccaggactcccccctgagccagcctcgtagtcctgcccagatcttgatttccttagagagtgaggaaagaggggagctagagagaatcctagcagatcttgaggaagaaaacaggaatctgcaagcagaatatgaccgtctaaagcagcagcacgaacataaaggcctgtccccactgccgtcccctcctgaaatgatgcccacctctccccagagtccccgggatgctgagctcattgctgaggccaagctactgcgtcaacacaaaggccgcctggaagccaggatgcaaatcctggaagaccacaataaacagctggagtcacagttacacaggctaaggcagctgctggagcaaccccaggcagaggccaaagtgaatggcacaacggtgtcctctccttctacctctctacagaggtccgacagcagtcagcctatgctgctccgagtggttggcagtcaaacttcggactccatgggtgaggaagatcttctcagtcctccccaggacacaagcacagggttagaggaggtgatggagcaactcaacaactccttccctagttcaagaggacacaatgtaggaagtcttttccacatggcagatgatttgggcagagcgatggagtccttagtatcagtcatgacagatgaagaaggagcagaataaatgttttacaactcctgattcccgcatggtttttataatattcatacaacaaagaggattagacagtaagagtttacaagaaataaatctatatttttgtgaagggtagtggtattatactgtagatttcagtagtttctaagtctgttattgttttgttaacaatggcaggttttacacgtctatgcaattgtacaaaaaagttataagaaaactacatgtaaaatcttgatagctaaataacttgccatttctttatatggaacgcattttgggttgtttaaaaatttataacagttataaagaaagattgtaaactaaagtgtgctttataaaaaaaagttgtttataaaaacccctaaaaacaaaacaaacacacacacacacacatacacacacacacacaaaactttgaggcagcgcattgttttgcatccttttggcgtgatatccatatgaaattcatggctttttctttttttgcatattaaagataagacttcctctaccaccacaccaaatgactactacacactgctcatttgagaactgtcagctgagtggggcaggcttgagttttcatttcatatatctatatgtctataagtatataaatactatagttatatagataaagagatacgaatttctatagactgactttttccattttttaaatgttcatgtcacatcctaatagaaagaaattacttctagtcagtcatccaggcttacctgcttggtctagaatggatttttcccggagccggaagccaggaggaaactacaccacactaaaacattgtctacagctccagatgtttctcattttaaacaactttccactgacaacgaaagtaaagtaaagtattggatttttttaaagggaacatgtgaatgaatacacaggacttattatatcagagtgagtaatcggttggttggttgattgattgattgattgatacattcagcttcctgctgctagcaatgccacgatttagatttaatgatgcttcagtggaaatcaatcagaaggtattctgaccttgtgaacatcagaaggtattttttaactcccaagcagtagcaggacgatgatagggctggagggctatggattcccagcccatccctgtgaaggagtaggccactctttaagtgaaggattggatgattgttcataatacataaagttctctgtaattacaactaaattattatgccctcttctcacagtcaaaaggaactgggtggtttggtttttgttgcttttttagatttattgtcccatgtgggatgagtttttaaatgccacaagacataatttaaaataaataaactttgggaaaaggtgtaaaacagtagccccatcacatttgtgatactgacaggtatcaacccagaagcccatgaactgtgtttccatcctttgcatttctctgcgagtagttccacacaggtttgtaagtaagtaagaaagaaggcaaattgattcaaatgttacaaaaaaacccttcttggtggattagacaggttaaatatataaacaaacaaacaaaaattgctcaaaaaagaggagaaaagctcaagaggaaaagctaaggactggtaggaaaaagctttactctttcatgccattttatttctttttgatttttaaatcattcattcaatagataccaccgtgtgacctataattttgcaaatctgttacctctgacatcaagtgtaattagcttttggagagtgggctgacatcaagtgtaattagcttttggagagtgggttttgtccattattaataattaattaattaacatcaaacacggcttctcatgctatttctacctcactttggttttggggtgttcctgataattgtgcacacctgagttcacagcttcaccacttgtccattgcgttattttctttttcctttataattctttctttttccttcataattttcaaaagaaaacccaaagctctaaggtaacaaattaccaaattacatgaagatttggtttttgtcttgcatttttttcctttatgtgacgctggaccttttctttacccaaggatttttaaaactcagatttaaaacaaggggttactttacatcctactaagaagtttaagtaagtaagtttcattctaaaatcagaggtaaatagagtgcataaataattttgttttaatctttttgtttttcttttagacacattagctctggagtgagtctgtcataatatttgaacaaaaattgagagctttattgctgcattttaagcataattaatttggacattatttcgtgttgtgttctttataaccaccaagtattaaactgtaaatcataatgtaactgaagcataaacatcacatggcatgttttgtcattgttttcaggtactgagttcttacttgagtatcataatatattgtgttttaacaccaacactgtaacatttacgaattatttttttaaacttcagttttactgcattttcacaacatatcagacttcaccaaatatatgccttactattgtattatagtactgctttactgtgtatctcaataaagcacgcagttatgttacaaaaaagta

SEQ ID NO: 421 - protein, 3657 aa, Homo sapiens
MLWWEEVEDCYEREDVQKKTFTKWVNAQFSKFGKQHIENLFSDLQDGRRLLDLLEGLTGQKLPKEKGSTRVHALNNVNKALRVLQNNNVDLVNIGSTDIVDGNHKLTLGLIWNIILHWQVKNVMKNIMAGLQQTNSEKILLSWVRQSTRNYPQVNVINFTTSWSDGLALNALIHSHRPDLFDWNSVVCQQSATQRLEHAFNIARYQLGIEKLLDPEDVDTTYPDKKSILMYITSLFQVLPQQVSIEAIQEVEMLPRPPKVTKEEHFQLHHQMHYSQQITVSLAQGYERTSSPKPRFKSYAYTQAAYVTTSDPTRSPFPSQHLEAPEDKSFGSSLMESEVNLDRYQTALEEVLSWLLSAEDTLQAQGEISNDVEVVKDQFHTHEGYMMDLTAHQGRVGNILQLGSKLIGTGKLSEDEETEVQEQMNLLNSRWECLRVASMEKQSNLHRVLMDLQNQKLKELNDWLTKTEERTRKMEEEPLGPDLEDLKRQVQQHKVLQEDLEQEQVRVNSLTHMVVVVDESSGDHATAALEEQLKVLGDRWANICRWTEDRWVLLQDILLKWQRLTEEQCLFSAWLSEKEDAVNKIHTTGFKDQNEMLSSLQKLAVLKADLEKKKQSMGKLYSLKQDLLSTLKNKSVTQKTEAWLDNFARCWDNLVQKLEKSTAQISQAVTTTQPSLTQTTVMETVTTVTTREQILVKHAQEELPPPPPQKKRQITVDSEIRKRLDVDITELHSWITRSEAVLQSPEFAIFRKEGNFSDLKEKVNAIEREKAEKFRKLQDASRSAQALVEQMVNEGVNADSIKQASEQLNSRWIEFCQLLSERLNWLEYQNNIIAFYNQLQQLEQMTTTAENWLKIQPTTPSEPTAIKSQLKICKDEVNRLSDLQPQIERLKIQSIALKEKGQGPMFLDADFVAFTNHFKQVFSDVQAREKELQTIFDTLPPMRYQETMSAIRTWVQQSETKLSIPQLSVTDYEIMEQRLGELQALQSSLQEQQSGLYYLSTTVKEMSKKAPSEISRKYQSEFEEIEGRWKKLSSQLVEHCQKLEEQMNKLRKIQNHIQTLKKWMAEVDVFLKEEWPALGDSEILKKQLKQCRLLVSDIQTIQPSLNSVNEGGQKIKNEAEPEFASRLETELKELNTQWDHMCQQVYARKEALKGGLEKTVSLQKDLSEMHEWMTQAEEEYLERDFEYKTPDELQKAVEEMKRAKEEAQQKEAKVKLLTESVNSVIAQAPPVAQEALKKELETLTTNYQWLCTRLNGKCKTLEEVWACWHELLSYLEKANKWLNEVEFKLKTTENIPGGAEEISEVLDSLENLMRHSEDNPNQIRILAQTLTDGGVMDELINEELETFNSRWRELHEEAVRRQKLLEQSIQSAQETEKSLHLIQESLTFIDKQLAAYIADKVDAAQMPQEAQKIQSDLTSHEISLEEMKKHNQGKEAAQRVLSQIDVAQKKLQDVSMKFRLFQKPANFEQRLQESKMILDEVKMHLPALETKSVEQEVVQSQLNHCVNLYKSLSEVKSEVEMVIKTGRQIVQKKQTENPKELDERVTALKLHYNELGAKVTERKQQLEKCLKLSRKMRKEMNVLTEWLAATDMELTKRSAVEGMPSNLDSEVAWGKATQKEIEKQKVHLKSITEVGEALKTVLGKKETLVEDKLSLLNSNWIAVTSRAEEWLNLLLEYQKHMETFDQNVDHITKWIIQADTLLDESEKKKPQQKEDVLKRLKAELNDIRPKVDSTRDQAANLMANRGDHCRKLVEPQISELNHRFAAISHRIKTGKASIPLKELEQFNSDIQKLLEPLEAEIQQGVNLKEEDFNKDMDLRSQRRKKALEISHQWYQYKRQADDLLKCLDDIEKKLASLPEPRDERKIKEIDRELQKKKEELNAVRRQAEGLSEDGAAMAVEPTQIQLSKRWREIESKFAQFRRLNFAQIHTVREETMMVMTEDMPLEISYVPSTYLTEITHVSQALLEVEQLLNAPDLCAKDFEDLFKQEESLKNIKDSLQQSSGRIDIIHSKKTAALQSATPVERVKLQEALSQLDFQWEKVNKMYKDRQGRFDRSVEKWRRFHYDIKIFNQWLTEAEQFLRKTQIPENWEHAKYKWYLKELQDGIGQRQTVVRTLNATGEEIIQQSSKTDASILQEKLGSLNLRWQEVCKQLSDRKKRLEEQKNILSEFQRDLNEFVLWLEEADNIASIPLEPGKEQQLKEKLEQVKLLVEELPLRQGILKQLNETGGPVLVSAPISPEEQDKLENKLKQTNLQWIKVSRALPEKQGEIEAQIKDLGQLEKKLEDLEEQLNHLLLWLSPIRNQLEIYNQPNQEGPFDVKETEIAVQAKQPDVEEILSKGQHLYKEKPATQPVKRKLEDLSSEWKAVNRLLQELRAKQPDLAPGLTTIGASPTQTVTLVTQPVVTKETAISKLEMPSSLMLEVPALADFNRAWTELTDWLSLLDQVIKSQRVMVGDLEDINEMIIKQKATMQDLEQRRPQLEELITAAQNLKNKTSNQEARTIITDRIERIQNQWDEVQEHLQNRRQQLNEMLKDSTQWLEAKEEAEQVLGQARAKLESWKEGPYTVDAIQKKITETKQLAKDLRQWQTNVDVANDLALKLLRDYSADDTRKVHMITENINASWRSIHKRVSEREAALEETHRLLQQFPLDLEKFLAWLTEAETTANVLQDATRKERLLEDSKGVKELMKQWQDLQGEIEAHTDVYHNLDENSQKILRSLEGSDDAVLLQRRLDNMNFKWSELRKKSLNIRSHLEASSDQWKRLHLSLQELLVWLQLKDDELSRQAPIGGDFPAVQKQNDVHRAFKRELKTKEPVIMSTLETVRIFLTEQPLEGLEKLYQEPRELPPEERAQNVTRLLRKQAEEVNTEWEKLNLHSADWQRKIDETLERLRELQEATDELDLKLRQAEVIKGSWQPVGDLLIDSLQDHLEKVKALRGEIAPLKENVSHVNDLARQLTTLGIQLSPYNLSTLEDLNTRWKLLQVAVEDRVRQLHEAHRDFGPASQHFLSTSVQGPWERAISPNKVPYYINHETQTTCWDHPKMTELYQSLADLNNVRFSAYRTAMKLRRLQKALCLDLLSLSAACDALDQHNLKQNDQPMDILQIINCLTTIYDRLEQEHNNLVNVPLCVDMCLNWLLNVYDTGRTGRIRVLSFKTGIISLCKAHLEDKYRYLFKQVASSTGFCDQRRLGLLLHDSIQIPRQLGEVASFGGSNIEPSVRSCFQFANNKPEIEAALFLDWMRLEPQSMVWLPVLHRVAAAETAKHQAKCNICKECPIIGFRYRSLKHFNYDICQSCFFSGRVAKGHKMHYPMVEYCTPTTSGEDVRDFAKVLKNKFRTKRYFAKHPRMGYLPVQTVLEGDNMETPVTLINFWPVDSAPASSPQLSHDDTHSRIEHYASRLAEMENSNGSYLNDSISPNESIDDEHLLIQHYCQSLNQDSPLSQPRSPAQILISLESEERGELERILADLEEENRNLQAEYDRLKQQHEHKGLSPLPSPPEMMPTSPQSPRDAELIAEAKLLRQHKGRLEARMQILEDHNKQLESQLHRLRQLLEQPQAEAKVNGTTVSSPSTSLQRSDSSQPMLLRVVGSQTSDSMGEEDLLSPPQDTSTGLEEVMEQLNNSFPSSRGHNVGSLFHMADDLGRAMESLVSVMTDEEGAE

SEQ ID NO: 422 - DNA, 13625 bp, Homo sapiens
actttccccctacaggactcagatctgggaggcaattaccttcggagaaaaacgaataggaaaaactgaagtgttactttttttaaagctgctgaagtttgttggtttctcattgtttttaagcctactggagcaataaagtttgaagaacttttaccaggttttttttatcgctgccttgatatacacttttcaaaatgctttggtgggaagaagtagaggactgttatgaaagagaagatgttcaaaagaaaacattcacaaaatgggtaaatgcacaattttctaagtttgggaagcagcatattgagaacctcttcagtgacctacaggatgggaggcgcctcctagacctcctcgaaggcctgacagggcaaaaactgccaaaagaaaaaggatccacaagagttcatgccctgaacaatgtcaacaaggcactgcgggttttgcagaacaataatgttgatttagtgaatattggaagtactgacatcgtagatggaaatcataaactgactcttggtttgatttggaatataatcctccactggcaggtcaaaaatgtaatgaaaaatatcatggctggattgcaacaaaccaacagtgaaaagattctcctgagctgggtccgacaatcaactcgtaattatccacaggttaatgtaatcaacttcaccaccagctggtctgatggcctggctttgaatgctctcatccatagtcataggccagacctatttgactggaatagtgtggtttgccagcagtcagccacacaacgactggaacatgcattcaacatcgccagatatcaattaggcatagagaaactactcgatcctgaagatgttgataccacctatccagataagaagtccatcttaatgtacatcacatcactcttccaagttttgcctcaacaagtgagcattgaagccatccaggaagtggaaatgttgccaaggccacctaaagtgactaaagaagaacattttcagttacatcatcaaatgcactattctcaacagatcacggtcagtctagcacagggatatgagagaacttcttcccctaagcctcgattcaagagctatgcctacacacaggctgcttatgtcaccacctctgaccctacacggagcccatttccttcacagcatttggaagctcctgaagacaagtcatttggcagttcattgatggagagtgaagtaaacctggaccgttatcaaacagctttagaagaagtattatcgtggcttctttctgctgaggacacattgcaagcacaaggagagatttctaatgatgtggaagtggtgaaagaccagtttcatactcatgaggggtacatgatggatttgacagcccatcagggccgggttggtaatattctacaattgggaagtaagctgattggaacaggaaaattatcagaagatgaagaaactgaagtacaagagcagatgaatctcctaaattcaagatgggaatgcctcagggtagctagcatggaaaaacaaagcaatttacatagagttttaatggatctccagaatcagaaactgaaagagttgaatgactggctaacaaaaacagaagaaagaacaaggaaaatggaggaagagcctcttggacctgatcttgaagacctaaaacgccaagtacaacaacataaggtgcttcaagaagatctagaacaagaacaagtcagggtcaattctctcactcacatggtggtggtagttgatgaatctagtggagatcacgcaactgctgctttggaagaacaacttaaggtattgggagatcgatgggcaaacatctgtagatggacagaagaccgctgggttcttttacaagacatccttctcaaatggcaacgtcttactgaagaacagtgcctttttagtgcatggctttcagaaaaagaagatgcagtgaacaagattcacacaactggctttaaagatcaaaatgaaatgttatcaagtcttcaaaaactggccgttttaaaagcggatctagaaaagaaaaagcaatccatgggcaaactgtattcactcaaacaagatcttctttcaacactgaagaataagtcagtgacccagaagacggaagcatggctggataactttgcccggtgttgggataatttagtccaaaaacttgaaaagagtacagcacagatttcacaggctgtcaccaccactcagccatcactaacacagacaactgtaatggaaacagtaactacggtgaccacaagggaacagatcctggtaaagcatgctcaagaggaacttccaccaccacctccccaaaagaagaggcagattactgtggattctgaaattaggaaaaggttggatgttgatataactgaacttcacagctggattactcgctcagaagctgtgttgcagagtcctgaatttgcaatctttcggaaggaaggcaacttctcagacttaaaagaaaaagtcaatgccatagagcgagaaaaagctgagaagttcagaaaactgcaagatgccagcagatcagctcaggccctggtggaacagatggtgaatgagggtgttaatgcagatagcatcaaacaagcctcagaacaactgaacagccggtggatcgaattctgccagttgctaagtgagagacttaactggctggagtatcagaacaacatcatcgctttctataatcagctacaacaattggagcagatgacaactactgctgaaaactggttgaaaatccaacccaccaccccatcagagccaacagcaattaaaagtcagttaaaaatttgtaaggatgaagtcaaccggctatcagatcttcaacctcaaattgaacgattaaaaattcaaagcatagccctgaaagagaaaggacaaggacccatgttcctggatgcagactttgtggcctttacaaatcattttaagcaagtcttttctgatgtgcaggccagagagaaagagctacagacaatttttgacactttgccaccaatgcgctatcaggagaccatgagtgccatcaggacatgggtccagcagtcagaaaccaaactctccatacctcaacttagtgtcaccgactatgaaatcatggagcagagactcggggaattgcaggctttacaaagttctctgcaagagcaacaaagtggcctatactatctcagcaccactgtgaaagagatgtcgaagaaagcgccctctgaaattagccggaaatatcaatcagaatttgaagaaattgagggacgctggaagaagctctcctcccagctggttgagcattgtcaaaagctagaggagcaaatgaataaactccgaaaaattcagaatcacatacaaaccctgaagaaatggatggctgaagttgatgtttttctgaaggaggaatggcctgcccttggggattcagaaattctaaaaaagcagctgaaacagtgcagacttttagtcagtgatattcagacaattcagcccagtctaaacagtgtcaatgaaggtgggcagaagataaagaatgaagcagagccagagtttgcttcgagacttgagacagaactcaaagaacttaacactcagtgggatcacatgtgccaacaggtctatgccagaaaggaggccttgaagggaggtttggagaaaactgtaagcctccagaaagatctatcagagatgcacgaatggatgacacaagctgaagaagagtatcttgagagagattttgaatataaaactccagatgaattacagaaagcagttgaagagatgaagagagctaaagaagaggcccaacaaaaagaagcgaaagtgaaactccttactgagtctgtaaatagtgtcatagctcaagctccacctgtagcacaagaggccttaaaaaaggaacttgaaactctaaccaccaactaccagtggctctgcactaggctgaatgggaaatgcaagactttggaagaagtttgggcatgttggcatgagttattgtcatacttggagaaagcaaacaagtggctaaatgaagtagaatttaaacttaaaaccactgaaaacattcctggcggagctgaggaaatctctgaggtgctagattcacttgaaaatttgatgcgacattcagaggataacccaaatcagattcgcatattggcacagaccctaacagatggcggagtcatggatgagctaatcaatgaggaacttgagacatttaattctcgttggagggaactacatgaagaggctgtaaggaggcaaaagttgcttgaacagagcatccagtctgcccaggagactgaaaaatccttacacttaatccaggagtccctcacattcattgacaagcagttggcagcttatattgcagacaaggtggacgcagctcaaatgcctcaggaagcccagaaaatccaatctgatttgacaagtcatgagatcagtttagaagaaatgaagaaacataatcaggggaaggaggctgcccaaagagtcctgtctcagattgatgttgcacagaaaaaattacaagatgtctccatgaagtttcgattattccagaaaccagccaattttgagcagcgtctacaagaaagtaagatgattttagatgaagtgaagatgcacttgcctgcattggaaacaaagagtgtggaacaggaagtagtacagtcacagctaaatcattgtgtgaacttgtataaaagtctgagtgaagtgaagtctgaagtggaaatggtgataaagactggacgtcagattgtacagaaaaagcagacggaaaatcccaaagaacttgatgaaagagtaacagctttgaaattgcattataatgagctgggagcaaaggtaacagaaagaaagcaacagttggagaaatgcttgaaattgtcccgtaagatgcgaaaggaaatgaatgtcttgacagaatggctggcagctacagatatggaattgacaaagagatcagcagttgaaggaatgcctagtaatttggattctgaagttgcctggggaaaggctactcaaaaagagattgagaaacagaaggtgcacctgaagagtatcacagaggtaggagaggccttgaaaacagttttgggcaagaaggagacgttggtggaagataaactcagtcttctgaatagtaactggatagctgtcacctcccgagcagaagagtggttaaatcttttgttggaataccagaaacacatggaaacttttgaccagaatgtggaccacatcacaaagtggatcattcaggctgacacacttttggatgaatcagagaaaaagaaaccccagcaaaaagaagacgtgcttaagcgtttaaaggcagaactgaatgacatacgcccaaaggtggactctacacgtgaccaagcagcaaacttgatggcaaaccgcggtgaccactgcaggaaattagtagagccccaaatctcagagctcaaccatcgatttgcagccatttcacacagaattaagactggaaaggcctccattcctttgaaggaattggagcagtttaactcagatatacaaaaattgcttgaaccactggaggctgaaattcagcagggggtgaatctgaaagaggaagacttcaataaagatatgaatgaagacaatgagggtactgtaaaagaattgttgcaaagaggagacaacttacaacaaagaatcacagatgagagaaagcgagaggaaataaagataaaacagcagctgttacagacaaaacataatgctctcaaggatttgaggtctcaaagaagaaaaaaggctctagaaatttctcatcagtggtatcagtacaagaggcaggctgatgatctcctgaaatgcttggatgacattgaaaaaaaattagccagcctacctgagcccagagatgaaaggaaaataaaggaaattgatcgggaattgcagaagaagaaagaggagctgaatgcagtgcgtaggcaagctgagggcttgtctgaggatggggccgcaatggcagtggagccaactcagatccagctcagcaagcgctggcgggaaattgagagcaaatttgctcagtttcgaagactcaactttgcacaaattcacactgtccgtgaagaaacgatgatggtgatgactgaagacatgcctttggaaatttcttatgtgccttctacttatttgactgaaatcactcatgtctcacaagccctattagaagtggaacaacttctcaatgctcctgacctctgtgctaaggactttgaagatctctttaagcaagaggagtctctgaagaatataaaagatagtctacaacaaagctcaggtcggattgacattattcatagcaagaagacagcagcattgcaaagtgcaacgcctgtggaaagggtgaagctacaggaagctctctcccagcttgatttccaatgggaaaaagttaacaaaatgtacaaggaccgacaagggcgatttgacagatctgttgagaaatggcggcgttttcattatgatataaagatatttaatcagtggctaacagaagctgaacagtttctcagaaagacacaaattcctgagaattgggaacatgctaaatacaaatggtatcttaaggaactccaggatggcattgggcagcggcaaactgttgtcagaacattgaatgcaactggggaagaaataattcagcaatcctcaaaaacagatgccagtattctacaggaaaaattgggaagcctgaatctgcggtggcaggaggtctgcaaacagctgtcagacagaaaaaagaggctagaagaacaaaagaatatcttgtcagaatttcaaagagatttaaatgaatttgttttatggttggaggaagcagataacattgctagtatcccacttgaacctggaaaagagcagcaactaaaagaaaagcttgagcaagtcaagttactggtggaagagttgcccctgcgccagggaattctcaaacaattaaatgaaactggaggacccgtgcttgtaagtgctcccataagcccagaagagcaagataaacttgaaaataagctcaagcagacaaatctccagtggataaaggtttccagagctttacctgagaaacaaggagaaattgaagctcaaataaaagaccttgggcagcttgaaaaaaagcttgaagaccttgaagagcagttaaatcatctgctgctgtggttatctcctattaggaatcagttggaaatttataaccaaccaaaccaagaaggaccatttgacgttaaggaaactgaaatagcagttcaagctaaacaaccggatgtggaagagattttgtctaaagggcagcatttgtacaaggaaaaaccagccactcagccagtgaagaggaagttagaagatctgagctctgagtggaaggcggtaaaccgtttacttcaagagctgagggcaaagcagcctgacctagctcctggactgaccactattggagcctctcctactcagactgttactctggtgacacaacctgtggttactaaggaaactgccatctccaaactagaaatgccatcttccttgatgttggaggtacctgctctggcagatttcaaccgggcttggacagaacttaccgactggctttctctgcttgatcaagttataaaatcacagagggtgatggtgggtgaccttgaggatatcaacgagatgatcatcaagcagaaggcaacaatgcaggatttggaacagaggcgtccccagttggaagaactcattaccgctgcccaaaatttgaaaaacaagaccagcaatcaagaggctagaacaatcattacggatcgaattgaaagaattcagaatcagtgggatgaagtacaagaacaccttcagaaccggaggcaacagttgaatgaaatgttaaaggattcaacacaatggctggaagctaaggaagaagctgagcaggtcttaggacaggccagagccaagcttgagtcatggaaggagggtccctatacagtagatgcaatccaaaagaaaatcacagaaaccaagcagttggccaaagacctccgccagtggcagacaaatgtagatgtggcaaatgacttggccctgaaacttctccgggattattctgcagatgataccagaaaagtccacatgataacagagaatatcaatgcctcttggagaagcattcataaaagggtgagtgagcgagaggctgctttggaagaaactcatagattactgcaacagttccccctggacctggaaaagtttcttgcctggcttacagaagctgaaacaactgccaatgtcctacaggatgctacccgtaaggaaaggctcctagaagactccaagggagtaaaagagctgatgaaacaatggcaagacctccaaggtgaaattgaagctcacacagatgtttatcacaacctggatgaaaacagccaaaaaatcctgagatccctggaaggttccgatgatgcagtcctgttacaaagacgtttggataacatgaacttcaagtggagtgaacttcggaaaaagtctctcaacattaggtcccatttggaagccagttctgaccagtggaagcgtctgcacctttctctgcaggaacttctggtgtggctacagctgaaagatgatgaattaagccggcaggcacctattggaggcgactttccagcagttcagaagcagaacgatgtacatagggccttcaagagggaattgaaaactaaagaacctgtaatcatgagtactcttgagactgtacgaatatttctgacagagcagcctttggaaggactagagaaactctaccaggagcccagagagctgcctcctgaggagagagcccagaatgtcactcggcttctacgaaagcaggctgaggaggtcaatactgagtgggaaaaattgaacctgcactccgctgactggcagagaaaaatagatgagacccttgaaagactccgggaacttcaagaggccacggatgagctggacctcaagctgcgccaagctgaggtgatcaagggatcctggcagcccgtgggcgatctcctcattgactctctccaagatcacctcgagaaagtcaaggcacttcgaggagaaattgcgcctctgaaagagaacgtgagccacgtcaatgaccttgctcgccagcttaccactttgggcattcagctctcaccgtataacctcagcactctggaagacctgaacaccagatggaagcttctgcaggtggccgtcgaggaccgagtcaggcagctgcatgaagcccacagggactttggtccagcatctcagcactttctttccacgtctgtccagggtccctgggagagagccatctcgccaaacaaagtgccctactatatcaaccacgagactcaaacaacttgctgggaccatcccaaaatgacagagctctaccagtctttagctgacctgaataatgtcagattctcagcttataggactgccatgaaactccgaagactgcagaaggccctttgcttggatctcttgagcctgtcagctgcatgtgatgccttggaccagcacaacctcaagcaaaatgaccagcccatggatatcctgcagattattaattgtttgaccactatttatgaccgcctggagcaagagcacaacaatttggtcaacgtccctctctgcgtggatatgtgtctgaactggctgctgaatgtttatgatacgggacgaacagggaggatccgtgtcctgtcttttaaaactggcatcatttccctgtgtaaagcacatttggaagacaagtacagataccttttcaagcaagtggcaagttcaacaggattttgtgaccagcgcaggctgggcctccttctgcatgattctatccaaattccaagacagttgggtgaagttgcatcctttgggggcagtaacattgagccaagtgtccggagctgcttccaatttgctaataataagccagagatcgaagcggccctcttcctagactggatgagactggaaccccagtccatggtgtggctgcccgtcctgcacagagtggctgctgcagaaactgccaagcatcaggccaaatgtaacatctgcaaagagtgtccaatcattggattcaggtacaggagtctaaagcactttaattatgacatctgccaaagctgctttttttctggtcgagttgcaaaaggccataaaatgcactatcccatggtggaatattgcactccgactacatcaggagaagatgttcgagactttgccaaggtactaaaaaacaaatttcgaaccaaaaggtattttgcgaagcatccccgaatgggctacctgccagtgcagactgtcttagagggggacaacatggaaacgaatctgcaagcagaatatgaccgtctaaagcagcagcacgaacataaaggcctgtccccactgccgtcccctcctgaaatgatgcccacctctccccagagtccccgggatgctgagctcattgctgaggccaagctactgcgtcaacacaaaggccgcctggaagccaggatgcaaatcctggaagaccacaataaacagctggagtcacagttacacaggctaaggcagctgctggagcaaccccaggcagaggccaaagtgaatggcacaacggtgtcctctccttctacctctctacagaggtccgacagcagtcagcctatgctgctccgagtggttggcagtcaaacttcggactccatgggtgaggaagatcttctcagtcctccccaggacacaagcacagggttagaggaggtgatggagcaactcaacaactccttccctagttcaagaggaagaaatacccctggaaagccaatgagagaggacacaatgtaggaagtcttttccacatggcagatgatttgggcagagcgatggagtccttagtatcagtcatgacagatgaagaaggagcagaataaatgttttacaactcctgattcccgcatggtttttataatattcatacaacaaagaggattagacagtaagagtttacaagaaataaatctatatttttgtgaagggtagtggtattatactgtagatttcagtagtttctaagtctgttattgttttgttaacaatggcaggttttacacgtctatgcaattgtacaaaaaagttataagaaaactacatgtaaaatcttgatagctaaataacttgccatttctttatatggaacgcattttgggttgtttaaaaatttataacagttataaagaaagattgtaaactaaagtgtgctttataaaaaaaagttgtttataaaaacccctaaaaacaaaacaaacacacacacacacacatacacacacacacacaaaactttgaggcagcgcattgttttgcatccttttggcgtgatatccatatgaaattcatggctttttctttttttgcatattaaagataagacttcctctaccaccacaccaaatgactactacacactgctcatttgagaactgtcagctgagtggggcaggcttgagttttcatttcatatatctatatgtctataagtatataaatactatagttatatagataaagagatacgaatttctatagactgactttttccattttttaaatgttcatgtcacatcctaatagaaagaaattacttctagtcagtcatccaggcttacctgcttggtctagaatggatttttcccggagccggaagccaggaggaaactacaccacactaaaacattgtctacagctccagatgtttctcattttaaacaactttccactgacaacgaaagtaaagtaaagtattggatttttttaaagggaacatgtgaatgaatacacaggacttattatatcagagtgagtaatcggttggttggttgattgattgattgattgatacattcagcttcctgctgctagcaatgccacgatttagatttaatgatgcttcagtggaaatcaatcagaaggtattctgaccttgtgaacatcagaaggtattttttaactcccaagcagtagcaggacgatgatagggctggagggctatggattcccagcccatccctgtgaaggagtaggccactctttaagtgaaggattggatgattgttcataatacataaagttctctgtaattacaactaaattattatgccctcttctcacagtcaaaaggaactgggtggtttggtttttgttgcttttttagatttattgtcccatgtgggatgagtttttaaatgccacaagacataatttaaaataaataaactttgggaaaaggtgtaaaacagtagccccatcacatttgtgatactgacaggtatcaacccagaagcccatgaactgtgtttccatcctttgcatttctctgcgagtagttccacacaggtttgtaagtaagtaagaaagaaggcaaattgattcaaatgttacaaaaaaacccttcttggtggattagacaggttaaatatataaacaaacaaacaaaaattgctcaaaaaagaggagaaaagctcaagaggaaaagctaaggactggtaggaaaaagctttactctttcatgccattttatttctttttgatttttaaatcattcattcaatagataccaccgtgtgacctataattttgcaaatctgttacctctgacatcaagtgtaattagcttttggagagtgggctgacatcaagtgtaattagcttttggagagtgggttttgtccattattaataattaattaattaacatcaaacacggcttctcatgctatttctacctcactttggttttggggtgttcctgataattgtgcacacctgagttcacagcttcaccacttgtccattgcgttattttctttttcctttataattctttctttttccttcataattttcaaaagaaaacccaaagctctaaggtaacaaattaccaaattacatgaagatttggtttttgtcttgcatttttttcctttatgtgacgctggaccttttctttacccaaggatttttaaaactcagatttaaaacaaggggttactttacatcctactaagaagtttaagtaagtaagtttcattctaaaatcagaggtaaatagagtgcataaataattttgttttaatctttttgtttttcttttagacacattagctctggagtgagtctgtcataatatttgaacaaaaattgagagctttattgctgcattttaagcataattaatttggacattatttcgtgttgtgttctttataaccaccaagtattaaactgtaaatcataatgtaactgaagcataaacatcacatggcatgttttgtcattgttttcaggtactgagttcttacttgagtatcataatatattgtgttttaacaccaacactgtaacatttacgaattatttttttaaacttcagttttactgcattttcacaacatatcagacttcaccaaatatatgccttactattgtattatagtactgctttactgtgtatctcaataaagcacgcagttatgttacaaaaaagta

SEQ ID NO: 423 - protein, 3575 aa, Homo sapiens
MLWWEEVEDCYEREDVQKKTFTKWVNAQFSKFGKQHIENLFSDLQDGRRLLDLLEGLTGQKLPKEKGSTRVHALNNVNKALRVLQNNNVDLVNIGSTDIVDGNHKLTLGLIWNIILHWQVKNVMKNIMAGLQQTNSEKILLSWVRQSTRNYPQVNVINFTTSWSDGLALNALIHSHRPDLFDWNSVVCQQSATQRLEHAFNIARYQLGIEKLLDPEDVDTTYPDKKSILMYITSLFQVLPQQVSIEAIQEVEMLPRPPKVTKEEHFQLHHQMHYSQQITVSLAQGYERTSSPKPRFKSYAYTQAAYVTTSDPTRSPFPSQHLEAPEDKSFGSSLMESEVNLDRYQTALEEVLSWLLSAEDTLQAQGEISNDVEVVKDQFHTHEGYMMDLTAHQGRVGNILQLGSKLIGTGKLSEDEETEVQEQMNLLNSRWECLRVASMEKQSNLHRVLMDLQNQKLKELNDWLTKTEERTRKMEEEPLGPDLEDLKRQVQQHKVLQEDLEQEQVRVNSLTHMVVVVDESSGDHATAALEEQLKVLGDRWANICRWTEDRWVLLQDILLKWQRLTEEQCLFSAWLSEKEDAVNKIHTTGFKDQNEMLSSLQKLAVLKADLEKKKQSMGKLYSLKQDLLSTLKNKSVTQKTEAWLDNFARCWDNLVQKLEKSTAQISQAVTTTQPSLTQTTVMETVTTVTTREQILVKHAQEELPPPPPQKKRQITVDSEIRKRLDVDITELHSWITRSEAVLQSPEFAIFRKEGNFSDLKEKVNAIEREKAEKFRKLQDASRSAQALVEQMVNEGVNADSIKQASEQLNSRWIEFCQLLSERLNWLEYQNNIIAFYNQLQQLEQMTTTAENWLKIQPTTPSEPTAIKSQLKICKDEVNRLSDLQPQIERLKIQSIALKEKGQGPMFLDADFVAFTNHFKQVFSDVQAREKELQTIFDTLPPMRYQETMSAIRTWVQQSETKLSIPQLSVTDYEIMEQRLGELQALQSSLQEQQSGLYYLSTTVKEMSKKAPSEISRKYQSEFEEIEGRWKKLSSQLVEHCQKLEEQMNKLRKIQNHIQTLKKWMAEVDVFLKEEWPALGDSEILKKQLKQCRLLVSDIQTIQPSLNSVNEGGQKIKNEAEPEFASRLETELKELNTQWDHMCQQVYARKEALKGGLEKTVSLQKDLSEMHEWMTQAEEEYLERDFEYKTPDELQKAVEEMKRAKEEAQQKEAKVKLLTESVNSVIAQAPPVAQEALKKELETLTTNYQWLCTRLNGKCKTLEEVWACWHELLSYLEKANKWLNEVEFKLKTTENIPGGAEEISEVLDSLENLMRHSEDNPNQIRILAQTLTDGGVMDELINEELETFNSRWRELHEEAVRRQKLLEQSIQSAQETEKSLHLIQESLTFIDKQLAAYIADKVDAAQMPQEAQKIQSDLTSHEISLEEMKKHNQGKEAAQRVLSQIDVAQKKLQDVSMKFRLFQKPANFEQRLQESKMILDEVKMHLPALETKSVEQEVVQSQLNHCVNLYKSLSEVKSEVEMVIKTGRQIVQKKQTENPKELDERVTALKLHYNELGAKVTERKQQLEKCLKLSRKMRKEMNVLTEWLAATDMELTKRSAVEGMPSNLDSEVAWGKATQKEIEKQKVHLKSITEVGEALKTVLGKKETLVEDKLSLLNSNWIAVTSRAEEWLNLLLEYQKHMETFDQNVDHITKWIIQADTLLDESEKKKPQQKEDVLKRLKAELNDIRPKVDSTRDQAANLMANRGDHCRKLVEPQISELNHRFAAISHRIKTGKASIPLKELEQFNSDIQKLLEPLEAEIQQGVNLKEEDFNKDMNEDNEGTVKELLQRGDNLQQRITDERKREEIKIKQQLLQTKHNALKDLRSQRRKKALEISHQWYQYKRQADDLLKCLDDIEKKLASLPEPRDERKIKEIDRELQKKKEELNAVRRQAEGLSEDGAAMAVEPTQIQLSKRWREIESKFAQFRRLNFAQIHTVREETMMVMTEDMPLEISYVPSTYLTEITHVSQALLEVEQLLNAPDLCAKDFEDLFKQEESLKNIKDSLQQSSGRIDIIHSKKTAALQSATPVERVKLQEALSQLDFQWEKVNKMYKDRQGRFDRSVEKWRRFHYDIKIFNQWLTEAEQFLRKTQIPENWEHAKYKWYLKELQDGIGQRQTVVRTLNATGEEIIQQSSKTDASILQEKLGSLNLRWQEVCKQLSDRKKRLEEQKNILSEFQRDLNEFVLWLEEADNIASIPLEPGKEQQLKEKLEQVKLLVEELPLRQGILKQLNETGGPVLVSAPISPEEQDKLENKLKQTNLQWIKVSRALPEKQGEIEAQIKDLGQLEKKLEDLEEQLNHLLLWLSPIRNQLEIYNQPNQEGPFDVKETEIAVQAKQPDVEEILSKGQHLYKEKPATQPVKRKLEDLSSEWKAVNRLLQELRAKQPDLAPGLTTIGASPTQTVTLVTQPVVTKETAISKLEMPSSLMLEVPALADFNRAWTELTDWLSLLDQVIKSQRVMVGDLEDINEMIIKQKATMQDLEQRRPQLEELITAAQNLKNKTSNQEARTIITDRIERIQNQWDEVQEHLQNRRQQLNEMLKDSTQWLEAKEEAEQVLGQARAKLESWKEGPYTVDAIQKKITETKQLAKDLRQWQTNVDVANDLALKLLRDYSADDTRKVHMITENINASWRSIHKRVSEREAALEETHRLLQQFPLDLEKFLAWLTEAETTANVLQDATRKERLLEDSKGVKELMKQWQDLQGEIEAHTDVYHNLDENSQKILRSLEGSDDAVLLQRRLDNMNFKWSELRKKSLNIRSHLEASSDQWKRLHLSLQELLVWLQLKDDELSRQAPIGGDFPAVQKQNDVHRAFKRELKTKEPVIMSTLETVRIFLTEQPLEGLEKLYQEPRELPPEERAQNVTRLLRKQAEEVNTEWEKLNLHSADWQRKIDETLERLRELQEATDELDLKLRQAEVIKGSWQPVGDLLIDSLQDHLEKVKALRGEIAPLKENVSHVNDLARQLTTLGIQLSPYNLSTLEDLNTRWKLLQVAVEDRVRQLHEAHRDFGPASQHFLSTSVQGPWERAISPNKVPYYINHETQTTCWDHPKMTELYQSLADLNNVRFSAYRTAMKLRRLQKALCLDLLSLSAACDALDQHNLKQNDQPMDILQIINCLTTIYDRLEQEHNNLVNVPLCVDMCLNWLLNVYDTGRTGRIRVLSFKTGIISLCKAHLEDKYRYLFKQVASSTGFCDQRRLGLLLHDSIQIPRQLGEVASFGGSNIEPSVRSCFQFANNKPEIEAALFLDWMRLEPQSMVWLPVLHRVAAAETAKHQAKCNICKECPIIGFRYRSLKHFNYDICQSCFFSGRVAKGHKMHYPMVEYCTPTTSGEDVRDFAKVLKNKFRTKRYFAKHPRMGYLPVQTVLEGDNMETNLQAEYDRLKQQHEHKGLSPLPSPPEMMPTSPQSPRDAELIAEAKLLRQHKGRLEARMQILEDHNKQLESQLHRLRQLLEQPQAEAKVNGTTVSSPSTSLQRSDSSQPMLLRVVGSQTSDSMGEEDLLSPPQDTSTGLEEVMEQLNNSFPSSRGRNTPGKPMREDTM

SEQ ID NO: 424 - DNA, 13916 bp, Homo sapiens
actttccccctacaggactcagatctgggaggcaattaccttcggagaaaaacgaataggaaaaactgaagtgttactttttttaaagctgctgaagtttgttggtttctcattgtttttaagcctactggagcaataaagtttgaagaacttttaccaggttttttttatcgctgccttgatatacacttttcaaaatgctttggtgggaagaagtagaggactgttatgaaagagaagatgttcaaaagaaaacattcacaaaatgggtaaatgcacaattttctaagtttgggaagcagcatattgagaacctcttcagtgacctacaggatgggaggcgcctcctagacctcctcgaaggcctgacagggcaaaaactgccaaaagaaaaaggatccacaagagttcatgccctgaacaatgtcaacaaggcactgcgggttttgcagaacaataatgttgatttagtgaatattggaagtactgacatcgtagatggaaatcataaactgactcttggtttgatttggaatataatcctccactggcaggtcaaaaatgtaatgaaaaatatcatggctggattgcaacaaaccaacagtgaaaagattctcctgagctgggtccgacaatcaactcgtaattatccacaggttaatgtaatcaacttcaccaccagctggtctgatggcctggctttgaatgctctcatccatagtcataggccagacctatttgactggaatagtgtggtttgccagcagtcagccacacaacgactggaacatgcattcaacatcgccagatatcaattaggcatagagaaactactcgatcctgaagatgttgataccacctatccagataagaagtccatcttaatgtacatcacatcactcttccaagttttgcctcaacaagtgagcattgaagccatccaggaagtggaaatgttgccaaggccacctaaagtgactaaagaagaacattttcagttacatcatcaaatgcactattctcaacagatcacggtcagtctagcacagggatatgagagaacttcttcccctaagcctcgattcaagagctatgcctacacacaggctgcttatgtcaccacctctgaccctacacggagcccatttccttcacagcatttggaagctcctgaagacaagtcatttggcagttcattgatggagagtgaagtaaacctggaccgttatcaaacagctttagaagaagtattatcgtggcttctttctgctgaggacacattgcaagcacaaggagagatttctaatgatgtggaagtggtgaaagaccagtttcatactcatgaggggtacatgatggatttgacagcccatcagggccgggttggtaatattctacaattgggaagtaagctgattggaacaggaaaattatcagaagatgaagaaactgaagtacaagagcagatgaatctcctaaattcaagatgggaatgcctcagggtagctagcatggaaaaacaaagcaatttacatagagttttaatggatctccagaatcagaaactgaaagagttgaatgactggctaacaaaaacagaagaaagaacaaggaaaatggaggaagagcctcttggacctgatcttgaagacctaaaacgccaagtacaacaacataaggtgcttcaagaagatctagaacaagaacaagtcagggtcaattctctcactcacatggtggtggtagttgatgaatctagtggagatcacgcaactgctgctttggaagaacaacttaaggtattgggagatcgatgggcaaacatctgtagatggacagaagaccgctgggttcttttacaagacatccttctcaaatggcaacgtcttactgaagaacagtgcctttttagtgcatggctttcagaaaaagaagatgcagtgaacaagattcacacaactggctttaaagatcaaaatgaaatgttatcaagtcttcaaaaactggccgttttaaaagcggatctagaaaagaaaaagcaatccatgggcaaactgtattcactcaaacaagatcttctttcaacactgaagaataagtcagtgacccagaagacggaagcatggctggataactttgcccggtgttgggataatttagtccaaaaacttgaaaagagtacagcacagatttcacaggctgtcaccaccactcagccatcactaacacagacaactgtaatggaaacagtaactacggtgaccacaagggaacagatcctggtaaagcatgctcaagaggaacttccaccaccacctccccaaaagaagaggcagattactgtggattctgaaattaggaaaaggttggatgttgatataactgaacttcacagctggattactcgctcagaagctgtgttgcagagtcctgaatttgcaatctttcggaaggaaggcaacttctcagacttaaaagaaaaagtcaatgccatagagcgagaaaaagctgagaagttcagaaaactgcaagatgccagcagatcagctcaggccctggtggaacagatggtgaatgagggtgttaatgcagatagcatcaaacaagcctcagaacaactgaacagccggtggatcgaattctgccagttgctaagtgagagacttaactggctggagtatcagaacaacatcatcgctttctataatcagctacaacaattggagcagatgacaactactgctgaaaactggttgaaaatccaacccaccaccccatcagagccaacagcaattaaaagtcagttaaaaatttgtaaggatgaagtcaaccggctatcagatcttcaacctcaaattgaacgattaaaaattcaaagcatagccctgaaagagaaaggacaaggacccatgttcctggatgcagactttgtggcctttacaaatcattttaagcaagtcttttctgatgtgcaggccagagagaaagagctacagacaatttttgacactttgccaccaatgcgctatcaggagaccatgagtgccatcaggacatgggtccagcagtcagaaaccaaactctccatacctcaacttagtgtcaccgactatgaaatcatggagcagagactcggggaattgcaggctttacaaagttctctgcaagagcaacaaagtggcctatactatctcagcaccactgtgaaagagatgtcgaagaaagcgccctctgaaattagccggaaatatcaatcagaatttgaagaaattgagggacgctggaagaagctctcctcccagctggttgagcattgtcaaaagctagaggagcaaatgaataaactccgaaaaattcagaatcacatacaaaccctgaagaaatggatggctgaagttgatgtttttctgaaggaggaatggcctgcccttggggattcagaaattctaaaaaagcagctgaaacagtgcagacttttagtcagtgatattcagacaattcagcccagtctaaacagtgtcaatgaaggtgggcagaagataaagaatgaagcagagccagagtttgcttcgagacttgagacagaactcaaagaacttaacactcagtgggatcacatgtgccaacaggtctatgccagaaaggaggccttgaagggaggtttggagaaaactgtaagcctccagaaagatctatcagagatgcacgaatggatgacacaagctgaagaagagtatcttgagagagattttgaatataaaactccagatgaattacagaaagcagttgaagagatgaagagagctaaagaagaggcccaacaaaaagaagcgaaagtgaaactccttactgagtctgtaaatagtgtcatagctcaagctccacctgtagcacaagaggccttaaaaaaggaacttgaaactctaaccaccaactaccagtggctctgcactaggctgaatgggaaatgcaagactttggaagaagtttgggcatgttggcatgagttattgtcatacttggagaaagcaaacaagtggctaaatgaagtagaatttaaacttaaaaccactgaaaacattcctggcggagctgaggaaatctctgaggtgctagattcacttgaaaatttgatgcgacattcagaggataacccaaatcagattcgcatattggcacagaccctaacagatggcggagtcatggatgagctaatcaatgaggaacttgagacatttaattctcgttggagggaactacatgaagaggctgtaaggaggcaaaagttgcttgaacagagcatccagtctgcccaggagactgaaaaatccttacacttaatccaggagtccctcacattcattgacaagcagttggcagcttatattgcagacaaggtggacgcagctcaaatgcctcaggaagcccagaaaatccaatctgatttgacaagtcatgagatcagtttagaagaaatgaagaaacataatcaggggaaggaggctgcccaaagagtcctgtctcagattgatgttgcacagaaaaaattacaagatgtctccatgaagtttcgattattccagaaaccagccaattttgagcagcgtctacaagaaagtaagatgattttagatgaagtgaagatgcacttgcctgcattggaaacaaagagtgtggaacaggaagtagtacagtcacagctaaatcattgtgtgaacttgtataaaagtctgagtgaagtgaagtctgaagtggaaatggtgataaagactggacgtcagattgtacagaaaaagcagacggaaaatcccaaagaacttgatgaaagagtaacagctttgaaattgcattataatgagctgggagcaaaggtaacagaaagaaagcaacagttggagaaatgcttgaaattgtcccgtaagatgcgaaaggaaatgaatgtcttgacagaatggctggcagctacagatatggaattgacaaagagatcagcagttgaaggaatgcctagtaatttggattctgaagttgcctggggaaaggctactcaaaaagagattgagaaacagaaggtgcacctgaagagtatcacagaggtaggagaggccttgaaaacagttttgggcaagaaggagacgttggtggaagataaactcagtcttctgaatagtaactggatagctgtcacctcccgagcagaagagtggttaaatcttttgttggaataccagaaacacatggaaacttttgaccagaatgtggaccacatcacaaagtggatcattcaggctgacacacttttggatgaatcagagaaaaagaaaccccagcaaaaagaagacgtgcttaagcgtttaaaggcagaactgaatgacatacgcccaaaggtggactctacacgtgaccaagcagcaaacttgatggcaaaccgcggtgaccactgcaggaaattagtagagccccaaatctcagagctcaaccatcgatttgcagccatttcacacagaattaagactggaaaggcctccattcctttgaaggaattggagcagtttaactcagatatacaaaaattgcttgaaccactggaggctgaaattcagcagggggtgaatctgaaagaggaagacttcaataaagatatgaatgaagacaatgagggtactgtaaaagaattgttgcaaagaggagacaacttacaacaaagaatcacagatgagagaaagcgagaggaaataaagataaaacagcagctgttacagacaaaacataatgctctcaaggatttgaggtctcaaagaagaaaaaaggctctagaaatttctcatcagtggtatcagtacaagaggcaggctgatgatctcctgaaatgcttggatgacattgaaaaaaaattagccagcctacctgagcccagagatgaaaggaaaataaaggaaattgatcgggaattgcagaagaagaaagaggagctgaatgcagtgcgtaggcaagctgagggcttgtctgaggatggggccgcaatggcagtggagccaactcagatccagctcagcaagcgctggcgggaaattgagagcaaatttgctcagtttcgaagactcaactttgcacaaattcacactgtccgtgaagaaacgatgatggtgatgactgaagacatgcctttggaaatttcttatgtgccttctacttatttgactgaaatcactcatgtctcacaagccctattagaagtggaacaacttctcaatgctcctgacctctgtgctaaggactttgaagatctctttaagcaagaggagtctctgaagaatataaaagatagtctacaacaaagctcaggtcggattgacattattcatagcaagaagacagcagcattgcaaagtgcaacgcctgtggaaagggtgaagctacaggaagctctctcccagcttgatttccaatgggaaaaagttaacaaaatgtacaaggaccgacaagggcgatttgacagatctgttgagaaatggcggcgttttcattatgatataaagatatttaatcagtggctaacagaagctgaacagtttctcagaaagacacaaattcctgagaattgggaacatgctaaatacaaatggtatcttaaggaactccaggatggcattgggcagcggcaaactgttgtcagaacattgaatgcaactggggaagaaataattcagcaatcctcaaaaacagatgccagtattctacaggaaaaattgggaagcctgaatctgcggtggcaggaggtctgcaaacagctgtcagacagaaaaaagaggctagaagaacaaaagaatatcttgtcagaatttcaaagagatttaaatgaatttgttttatggttggaggaagcagataacattgctagtatcccacttgaacctggaaaagagcagcaactaaaagaaaagcttgagcaagtcaagttactggtggaagagttgcccctgcgccagggaattctcaaacaattaaatgaaactggaggacccgtgcttgtaagtgctcccataagcccagaagagcaagataaacttgaaaataagctcaagcagacaaatctccagtggataaaggtttccagagctttacctgagaaacaaggagaaattgaagctcaaataaaagaccttgggcagcttgaaaaaaagcttgaagaccttgaagagcagttaaatcatctgctgctgtggttatctcctattaggaatcagttggaaatttataaccaaccaaaccaagaaggaccatttgacgttaaggaaactgaaatagcagttcaagctaaacaaccggatgtggaagagattttgtctaaagggcagcatttgtacaaggaaaaaccagccactcagccagtgaagaggaagttagaagatctgagctctgagtggaaggcggtaaaccgtttacttcaagagctgagggcaaagcagcctgacctagctcctggactgaccactattggagcctctcctactcagactgttactctggtgacacaacctgtggttactaaggaaactgccatctccaaactagaaatgccatcttccttgatgttggaggtacctgctctggcagatttcaaccgggcttggacagaacttaccgactggctttctctgcttgatcaagttataaaatcacagagggtgatggtgggtgaccttgaggatatcaacgagatgatcatcaagcagaaggcaacaatgcaggatttggaacagaggcgtccccagttggaagaactcattaccgctgcccaaaatttgaaaaacaagaccagcaatcaagaggctagaacaatcattacggatcgaattgaaagaattcagaatcagtgggatgaagtacaagaacaccttcagaaccggaggcaacagttgaatgaaatgttaaaggattcaacacaatggctggaagctaaggaagaagctgagcaggtcttaggacaggccagagccaagcttgagtcatggaaggagggtccctatacagtagatgcaatccaaaagaaaatcacagaaaccaagcagttggccaaagacctccgccagtggcagacaaatgtagatgtggcaaatgacttggccctgaaacttctccgggattattctgcagatgataccagaaaagtccacatgataacagagaatatcaatgcctcttggagaagcattcataaaagggtgagtgagcgagaggctgctttggaagaaactcatagattactgcaacagttccccctggacctggaaaagtttcttgcctggcttacagaagctgaaacaactgccaatgtcctacaggatgctacccgtaaggaaaggctcctagaagactccaagggagtaaaagagctgatgaaacaatggcaagacctccaaggtgaaattgaagctcacacagatgtttatcacaacctggatgaaaacagccaaaaaatcctgagatccctggaaggttccgatgatgcagtcctgttacaaagacgtttggataacatgaacttcaagtggagtgaacttcggaaaaagtctctcaacattaggtcccatttggaagccagttctgaccagtggaagcgtctgcacctttctctgcaggaacttctggtgtggctacagctgaaagatgatgaattaagccggcaggcacctattggaggcgactttccagcagttcagaagcagaacgatgtacatagggccttcaagagggaattgaaaactaaagaacctgtaatcatgagtactcttgagactgtacgaatatttctgacagagcagcctttggaaggactagagaaactctaccaggagcccagagagctgcctcctgaggagagagcccagaatgtcactcggcttctacgaaagcaggctgaggaggtcaatactgagtgggaaaaattgaacctgcactccgctgactggcagagaaaaatagatgagacccttgaaagactccgggaacttcaagaggccacggatgagctggacctcaagctgcgccaagctgaggtgatcaagggatcctggcagcccgtgggcgatctcctcattgactctctccaagatcacctcgagaaagtcaaggcacttcgaggagaaattgcgcctctgaaagagaacgtgagccacgtcaatgaccttgctcgccagcttaccactttgggcattcagctctcaccgtataacctcagcactctggaagacctgaacaccagatggaagcttctgcaggtggccgtcgaggaccgagtcaggcagctgcatgaagcccacagggactttggtccagcatctcagcactttctttccacgtctgtccagggtccctgggagagagccatctcgccaaacaaagtgccctactatatcaaccacgagactcaaacaacttgctgggaccatcccaaaatgacagagctctaccagtctttagctgacctgaataatgtcagattctcagcttataggactgccatgaaactccgaagactgcagaaggccctttgcttggatctcttgagcctgtcagctgcatgtgatgccttggaccagcacaacctcaagcaaaatgaccagcccatggatatcctgcagattattaattgtttgaccactatttatgaccgcctggagcaagagcacaacaatttggtcaacgtccctctctgcgtggatatgtgtctgaactggctgctgaatgtttatgatacgggacgaacagggaggatccgtgtcctgtcttttaaaactggcatcatttccctgtgtaaagcacatttggaagacaagtacagataccttttcaagcaagtggcaagttcaacaggattttgtgaccagcgcaggctgggcctccttctgcatgattctatccaaattccaagacagttgggtgaagttgcatcctttgggggcagtaacattgagccaagtgtccggagctgcttccaatttgctaataataagccagagatcgaagcggccctcttcctagactggatgagactggaaccccagtccatggtgtggctgcccgtcctgcacagagtggctgctgcagaaactgccaagcatcaggccaaatgtaacatctgcaaagagtgtccaatcattggattcaggtacaggagtctaaagcactttaattatgacatctgccaaagctgctttttttctggtcgagttgcaaaaggccataaaatgcactatcccatggtggaatattgcactccgactacatcaggagaagatgttcgagactttgccaaggtactaaaaaacaaatttcgaaccaaaaggtattttgcgaagcatccccgaatgggctacctgccagtgcagactgtcttagagggggacaacatggaaacgcctgcctcgtcccctcagctttcacacgatgatactcattcacgcattgaacattatgctagcaggctagcagaaatggaaaacagcaatggatcttatctaaatgatagcatctctcctaatgagagcatagatgatgaacatttgttaatccagcattactgccaaagtttgaaccaggactcccccctgagccagcctcgtagtcctgcccagatcttgatttccttagagagtgaggaaagaggggagctagagagaatcctagcagatcttgaggaagaaaacaggaatctgcaagcagaatatgaccgtctaaagcagcagcacgaacataaaggcctgtccccactgccgtcccctcctgaaatgatgcccacctctccccagagtccccgggatgctgagctcattgctgaggccaagctactgcgtcaacacaaaggccgcctggaagccaggatgcaaatcctggaagaccacaataaacagctggagtcacagttacacaggctaaggcagctgctggagcaaccccaggcagaggccaaagtgaatggcacaacggtgtcctctccttctacctctctacagaggtccgacagcagtcagcctatgctgctccgagtggttggcagtcaaacttcggactccatgggtgaggaagatcttctcagtcctccccaggacacaagcacagggttagaggaggtgatggagcaactcaacaactccttccctagttcaagaggaagaaatacccctggaaagccaatgagagaggacacaatgtaggaagtcttttccacatggcagatgatttgggcagagcgatggagtccttagtatcagtcatgacagatgaagaaggagcagaataaatgttttacaactcctgattcccgcatggtttttataatattcatacaacaaagaggattagacagtaagagtttacaagaaataaatctatatttttgtgaagggtagtggtattatactgtagatttcagtagtttctaagtctgttattgttttgttaacaatggcaggttttacacgtctatgcaattgtacaaaaaagttataagaaaactacatgtaaaatcttgatagctaaataacttgccatttctttatatggaacgcattttgggttgtttaaaaatttataacagttataaagaaagattgtaaactaaagtgtgctttataaaaaaaagttgtttataaaaacccctaaaaacaaaacaaacacacacacacacacatacacacacacacacaaaactttgaggcagcgcattgttttgcatccttttggcgtgatatccatatgaaattcatggctttttctttttttgcatattaaagataagacttcctctaccaccacaccaaatgactactacacactgctcatttgagaactgtcagctgagtggggcaggcttgagttttcatttcatatatctatatgtctataagtatataaatactatagttatatagataaagagatacgaatttctatagactgactttttccattttttaaatgttcatgtcacatcctaatagaaagaaattacttctagtcagtcatccaggcttacctgcttggtctagaatggatttttcccggagccggaagccaggaggaaactacaccacactaaaacattgtctacagctccagatgtttctcattttaaacaactttccactgacaacgaaagtaaagtaaagtattggatttttttaaagggaacatgtgaatgaatacacaggacttattatatcagagtgagtaatcggttggttggttgattgattgattgattgatacattcagcttcctgctgctagcaatgccacgatttagatttaatgatgcttcagtggaaatcaatcagaaggtattctgaccttgtgaacatcagaaggtattttttaactcccaagcagtagcaggacgatgatagggctggagggctatggattcccagcccatccctgtgaaggagtaggccactctttaagtgaaggattggatgattgttcataatacataaagttctctgtaattacaactaaattattatgccctcttctcacagtcaaaaggaactgggtggtttggtttttgttgcttttttagatttattgtcccatgtgggatgagtttttaaatgccacaagacataatttaaaataaataaactttgggaaaaggtgtaaaacagtagccccatcacatttgtgatactgacaggtatcaacccagaagcccatgaactgtgtttccatcctttgcatttctctgcgagtagttccacacaggtttgtaagtaagtaagaaagaaggcaaattgattcaaatgttacaaaaaaacccttcttggtggattagacaggttaaatatataaacaaacaaacaaaaattgctcaaaaaagaggagaaaagctcaagaggaaaagctaaggactggtaggaaaaagctttactctttcatgccattttatttctttttgatttttaaatcattcattcaatagataccaccgtgtgacctataattttgcaaatctgttacctctgacatcaagtgtaattagcttttggagagtgggctgacatcaagtgtaattagcttttggagagtgggttttgtccattattaataattaattaattaacatcaaacacggcttctcatgctatttctacctcactttggttttggggtgttcctgataattgtgcacacctgagttcacagcttcaccacttgtccattgcgttattttctttttcctttataattctttctttttccttcataattttcaaaagaaaacccaaagctctaaggtaacaaattaccaaattacatgaagatttggtttttgtcttgcatttttttcctttatgtgacgctggaccttttctttacccaaggatttttaaaactcagatttaaaacaaggggttactttacatcctactaagaagtttaagtaagtaagtttcattctaaaatcagaggtaaatagagtgcataaataattttgttttaatctttttgtttttcttttagacacattagctctggagtgagtctgtcataatatttgaacaaaaattgagagctttattgctgcattttaagcataattaatttggacattatttcgtgttgtgttctttataaccaccaagtattaaactgtaaatcataatgtaactgaagcataaacatcacatggcatgttttgtcattgttttcaggtactgagttcttacttgagtatcataatatattgtgttttaacaccaacactgtaacatttacgaattatttttttaaacttcagttttactgcattttcacaacatatcagacttcaccaaatatatgccttactattgtattatagtactgctttactgtgtatctcaataaagcacgcagttatgttacaaaaaagta

SEQ ID NO: 425 - protein, 3672 aa, Homo sapiens
MLWWEEVEDCYEREDVQKKTFTKWVNAQFSKFGKQHIENLFSDLQDGRRLLDLLEGLTGQKLPKEKGSTRVHALNNVNKALRVLQNNNVDLVNIGSTDIVDGNHKLTLGLIWNIILHWQVKNVMKNIMAGLQQTNSEKILLSWVRQSTRNYPQVNVINFTTSWSDGLALNALIHSHRPDLFDWNSVVCQQSATQRLEHAFNIARYQLGIEKLLDPEDVDTTYPDKKSILMYITSLFQVLPQQVSIEAIQEVEMLPRPPKVTKEEHFQLHHQMHYSQQITVSLAQGYERTSSPKPRFKSYAYTQAAYVTTSDPTRSPFPSQHLEAPEDKSFGSSLMESEVNLDRYQTALEEVLSWLLSAEDTLQAQGEISNDVEVVKDQFHTHEGYMMDLTAHQGRVGNILQLGSKLIGTGKLSEDEETEVQEQMNLLNSRWECLRVASMEKQSNLHRVLMDLQNQKLKELNDWLTKTEERTRKMEEEPLGPDLEDLKRQVQQHKVLQEDLEQEQVRVNSLTHMVVVVDESSGDHATAALEEQLKVLGDRWANICRWTEDRWVLLQDILLKWQRLTEEQCLFSAWLSEKEDAVNKIHTTGFKDQNEMLSSLQKLAVLKADLEKKKQSMGKLYSLKQDLLSTLKNKSVTQKTEAWLDNFARCWDNLVQKLEKSTAQISQAVTTTQPSLTQTTVMETVTTVTTREQILVKHAQEELPPPPPQKKRQITVDSEIRKRLDVDITELHSWITRSEAVLQSPEFAIFRKEGNFSDLKEKVNAIEREKAEKFRKLQDASRSAQALVEQMVNEGVNADSIKQASEQLNSRWIEFCQLLSERLNWLEYQNNIIAFYNQLQQLEQMTTTAENWLKIQPTTPSEPTAIKSQLKICKDEVNRLSDLQPQIERLKIQSIALKEKGQGPMFLDADFVAFTNHFKQVFSDVQAREKELQTIFDTLPPMRYQETMSAIRTWVQQSETKLSIPQLSVTDYEIMEQRLGELQALQSSLQEQQSGLYYLSTTVKEMSKKAPSEISRKYQSEFEEIEGRWKKLSSQLVEHCQKLEEQMNKLRKIQNHIQTLKKWMAEVDVFLKEEWPALGDSEILKKQLKQCRLLVSDIQTIQPSLNSVNEGGQKIKNEAEPEFASRLETELKELNTQWDHMCQQVYARKEALKGGLEKTVSLQKDLSEMHEWMTQAEEEYLERDFEYKTPDELQKAVEEMKRAKEEAQQKEAKVKLLTESVNSVIAQAPPVAQEALKKELETLTTNYQWLCTRLNGKCKTLEEVWACWHELLSYLEKANKWLNEVEFKLKTTENIPGGAEEISEVLDSLENLMRHSEDNPNQIRILAQTLTDGGVMDELINEELETFNSRWRELHEEAVRRQKLLEQSIQSAQETEKSLHLIQESLTFIDKQLAAYIADKVDAAQMPQEAQKIQSDLTSHEISLEEMKKHNQGKEAAQRVLSQIDVAQKKLQDVSMKFRLFQKPANFEQRLQESKMILDEVKMHLPALETKSVEQEVVQSQLNHCVNLYKSLSEVKSEVEMVIKTGRQIVQKKQTENPKELDERVTALKLHYNELGAKVTERKQQLEKCLKLSRKMRKEMNVLTEWLAATDMELTKRSAVEGMPSNLDSEVAWGKATQKEIEKQKVHLKSITEVGEALKTVLGKKETLVEDKLSLLNSNWIAVTSRAEEWLNLLLEYQKHMETFDQNVDHITKWIIQADTLLDESEKKKPQQKEDVLKRLKAELNDIRPKVDSTRDQAANLMANRGDHCRKLVEPQISELNHRFAAISHRIKTGKASIPLKELEQFNSDIQKLLEPLEAEIQQGVNLKEEDFNKDMNEDNEGTVKELLQRGDNLQQRITDERKREEIKIKQQLLQTKHNALKDLRSQRRKKALEISHQWYQYKRQADDLLKCLDDIEKKLASLPEPRDERKIKEIDRELQKKKEELNAVRRQAEGLSEDGAAMAVEPTQIQLSKRWREIESKFAQFRRLNFAQIHTVREETMMVMTEDMPLEISYVPSTYLTEITHVSQALLEVEQLLNAPDLCAKDFEDLFKQEESLKNIKDSLQQSSGRIDIIHSKKTAALQSATPVERVKLQEALSQLDFQWEKVNKMYKDRQGRFDRSVEKWRRFHYDIKIFNQWLTEAEQFLRKTQIPENWEHAKYKWYLKELQDGIGQRQTVVRTLNATGEEIIQQSSKTDASILQEKLGSLNLRWQEVCKQLSDRKKRLEEQKNILSEFQRDLNEFVLWLEEADNIASIPLEPGKEQQLKEKLEQVKLLVEELPLRQGILKQLNETGGPVLVSAPISPEEQDKLENKLKQTNLQWIKVSRALPEKQGEIEAQIKDLGQLEKKLEDLEEQLNHLLLWLSPIRNQLEIYNQPNQEGPFDVKETEIAVQAKQPDVEEILSKGQHLYKEKPATQPVKRKLEDLSSEWKAVNRLLQELRAKQPDLAPGLTTIGASPTQTVTLVTQPVVTKETAISKLEMPSSLMLEVPALADFNRAWTELTDWLSLLDQVIKSQRVMVGDLEDINEMIIKQKATMQDLEQRRPQLEELITAAQNLKNKTSNQEARTIITDRIERIQNQWDEVQEHLQNRRQQLNEMLKDSTQWLEAKEEAEQVLGQARAKLESWKEGPYTVDAIQKKITETKQLAKDLRQWQTNVDVANDLALKLLRDYSADDTRKVHMITENINASWRSIHKRVSEREAALEETHRLLQQFPLDLEKFLAWLTEAETTANVLQDATRKERLLEDSKGVKELMKQWQDLQGEIEAHTDVYHNLDENSQKILRSLEGSDDAVLLQRRLDNMNFKWSELRKKSLNIRSHLEASSDQWKRLHLSLQELLVWLQLKDDELSRQAPIGGDFPAVQKQNDVHRAFKRELKTKEPVIMSTLETVRIFLTEQPLEGLEKLYQEPRELPPEERAQNVTRLLRKQAEEVNTEWEKLNLHSADWQRKIDETLERLRELQEATDELDLKLRQAEVIKGSWQPVGDLLIDSLQDHLEKVKALRGEIAPLKENVSHVNDLARQLTTLGIQLSPYNLSTLEDLNTRWKLLQVAVEDRVRQLHEAHRDFGPASQHFLSTSVQGPWERAISPNKVPYYINHETQTTCWDHPKMTELYQSLADLNNVRFSAYRTAMKLRRLQKALCLDLLSLSAACDALDQHNLKQNDQPMDILQIINCLTTIYDRLEQEHNNLVNVPLCVDMCLNWLLNVYDTGRTGRIRVLSFKTGIISLCKAHLEDKYRYLFKQVASSTGFCDQRRLGLLLHDSIQIPRQLGEVASFGGSNIEPSVRSCFQFANNKPEIEAALFLDWMRLEPQSMVWLPVLHRVAAAETAKHQAKCNICKECPIIGFRYRSLKHFNYDICQSCFFSGRVAKGHKMHYPMVEYCTPTTSGEDVRDFAKVLKNKFRTKRYFAKHPRMGYLPVQTVLEGDNMETPASSPQLSHDDTHSRIEHYASRLAEMENSNGSYLNDSISPNESIDDEHLLIQHYCQSLNQDSPLSQPRSPAQILISLESEERGELERILADLEEENRNLQAEYDRLKQQHEHKGLSPLPSPPEMMPTSPQSPRDAELIAEAKLLRQHKGRLEARMQILEDHNKQLESQLHRLRQLLEQPQAEAKVNGTTVSSPSTSLQRSDSSQPMLLRVVGSQTSDSMGEEDLLSPPQDTSTGLEEVMEQLNNSFPSSRGRNTPGKPMREDTM

SEQ ID NO: 426 - DNA, 13923 bp, Homo sapiens
actttccccctacaggactcagatctgggaggcaattaccttcggagaaaaacgaataggaaaaactgaagtgttactttttttaaagctgctgaagtttgttggtttctcattgtttttaagcctactggagcaataaagtttgaagaacttttaccaggttttttttatcgctgccttgatatacacttttcaaaatgctttggtgggaagaagtagaggactgttatgaaagagaagatgttcaaaagaaaacattcacaaaatgggtaaatgcacaattttctaagtttgggaagcagcatattgagaacctcttcagtgacctacaggatgggaggcgcctcctagacctcctcgaaggcctgacagggcaaaaactgccaaaagaaaaaggatccacaagagttcatgccctgaacaatgtcaacaaggcactgcgggttttgcagaacaataatgttgatttagtgaatattggaagtactgacatcgtagatggaaatcataaactgactcttggtttgatttggaatataatcctccactggcaggtcaaaaatgtaatgaaaaatatcatggctggattgcaacaaaccaacagtgaaaagattctcctgagctgggtccgacaatcaactcgtaattatccacaggttaatgtaatcaacttcaccaccagctggtctgatggcctggctttgaatgctctcatccatagtcataggccagacctatttgactggaatagtgtggtttgccagcagtcagccacacaacgactggaacatgcattcaacatcgccagatatcaattaggcatagagaaactactcgatcctgaagatgttgataccacctatccagataagaagtccatcttaatgtacatcacatcactcttccaagttttgcctcaacaagtgagcattgaagccatccaggaagtggaaatgttgccaaggccacctaaagtgactaaagaagaacattttcagttacatcatcaaatgcactattctcaacagatcacggtcagtctagcacagggatatgagagaacttcttcccctaagcctcgattcaagagctatgcctacacacaggctgcttatgtcaccacctctgaccctacacggagcccatttccttcacagcatttggaagctcctgaagacaagtcatttggcagttcattgatggagagtgaagtaaacctggaccgttatcaaacagctttagaagaagtattatcgtggcttctttctgctgaggacacattgcaagcacaaggagagatttctaatgatgtggaagtggtgaaagaccagtttcatactcatgaggggtacatgatggatttgacagcccatcagggccgggttggtaatattctacaattgggaagtaagctgattggaacaggaaaattatcagaagatgaagaaactgaagtacaagagcagatgaatctcctaaattcaagatgggaatgcctcagggtagctagcatggaaaaacaaagcaatttacatagagttttaatggatctccagaatcagaaactgaaagagttgaatgactggctaacaaaaacagaagaaagaacaaggaaaatggaggaagagcctcttggacctgatcttgaagacctaaaacgccaagtacaacaacataaggtgcttcaagaagatctagaacaagaacaagtcagggtcaattctctcactcacatggtggtggtagttgatgaatctagtggagatcacgcaactgctgctttggaagaacaacttaaggtattgggagatcgatgggcaaacatctgtagatggacagaagaccgctgggttcttttacaagacatccttctcaaatggcaacgtcttactgaagaacagtgcctttttagtgcatggctttcagaaaaagaagatgcagtgaacaagattcacacaactggctttaaagatcaaaatgaaatgttatcaagtcttcaaaaactggccgttttaaaagcggatctagaaaagaaaaagcaatccatgggcaaactgtattcactcaaacaagatcttctttcaacactgaagaataagtcagtgacccagaagacggaagcatggctggataactttgcccggtgttgggataatttagtccaaaaacttgaaaagagtacagcacagatttcacaggctgtcaccaccactcagccatcactaacacagacaactgtaatggaaacagtaactacggtgaccacaagggaacagatcctggtaaagcatgctcaagaggaacttccaccaccacctccccaaaagaagaggcagattactgtggattctgaaattaggaaaaggttggatgttgatataactgaacttcacagctggattactcgctcagaagctgtgttgcagagtcctgaatttgcaatctttcggaaggaaggcaacttctcagacttaaaagaaaaagtcaatgccatagagcgagaaaaagctgagaagttcagaaaactgcaagatgccagcagatcagctcaggccctggtggaacagatggtgaatgagggtgttaatgcagatagcatcaaacaagcctcagaacaactgaacagccggtggatcgaattctgccagttgctaagtgagagacttaactggctggagtatcagaacaacatcatcgctttctataatcagctacaacaattggagcagatgacaactactgctgaaaactggttgaaaatccaacccaccaccccatcagagccaacagcaattaaaagtcagttaaaaatttgtaaggatgaagtcaaccggctatcagatcttcaacctcaaattgaacgattaaaaattcaaagcatagccctgaaagagaaaggacaaggacccatgttcctggatgcagactttgtggcctttacaaatcattttaagcaagtcttttctgatgtgcaggccagagagaaagagctacagacaatttttgacactttgccaccaatgcgctatcaggagaccatgagtgccatcaggacatgggtccagcagtcagaaaccaaactctccatacctcaacttagtgtcaccgactatgaaatcatggagcagagactcggggaattgcaggctttacaaagttctctgcaagagcaacaaagtggcctatactatctcagcaccactgtgaaagagatgtcgaagaaagcgccctctgaaattagccggaaatatcaatcagaatttgaagaaattgagggacgctggaagaagctctcctcccagctggttgagcattgtcaaaagctagaggagcaaatgaataaactccgaaaaattcagaatcacatacaaaccctgaagaaatggatggctgaagttgatgtttttctgaaggaggaatggcctgcccttggggattcagaaattctaaaaaagcagctgaaacagtgcagacttttagtcagtgatattcagacaattcagcccagtctaaacagtgtcaatgaaggtgggcagaagataaagaatgaagcagagccagagtttgcttcgagacttgagacagaactcaaagaacttaacactcagtgggatcacatgtgccaacaggtctatgccagaaaggaggccttgaagggaggtttggagaaaactgtaagcctccagaaagatctatcagagatgcacgaatggatgacacaagctgaagaagagtatcttgagagagattttgaatataaaactccagatgaattacagaaagcagttgaagagatgaagagagctaaagaagaggcccaacaaaaagaagcgaaagtgaaactccttactgagtctgtaaatagtgtcatagctcaagctccacctgtagcacaagaggccttaaaaaaggaacttgaaactctaaccaccaactaccagtggctctgcactaggctgaatgggaaatgcaagactttggaagaagtttgggcatgttggcatgagttattgtcatacttggagaaagcaaacaagtggctaaatgaagtagaatttaaacttaaaaccactgaaaacattcctggcggagctgaggaaatctctgaggtgctagattcacttgaaaatttgatgcgacattcagaggataacccaaatcagattcgcatattggcacagaccctaacagatggcggagtcatggatgagctaatcaatgaggaacttgagacatttaattctcgttggagggaactacatgaagaggctgtaaggaggcaaaagttgcttgaacagagcatccagtctgcccaggagactgaaaaatccttacacttaatccaggagtccctcacattcattgacaagcagttggcagcttatattgcagacaaggtggacgcagctcaaatgcctcaggaagcccagaaaatccaatctgatttgacaagtcatgagatcagtttagaagaaatgaagaaacataatcaggggaaggaggctgcccaaagagtcctgtctcagattgatgttgcacagaaaaaattacaagatgtctccatgaagtttcgattattccagaaaccagccaattttgagcagcgtctacaagaaagtaagatgattttagatgaagtgaagatgcacttgcctgcattggaaacaaagagtgtggaacaggaagtagtacagtcacagctaaatcattgtgtgaacttgtataaaagtctgagtgaagtgaagtctgaagtggaaatggtgataaagactggacgtcagattgtacagaaaaagcagacggaaaatcccaaagaacttgatgaaagagtaacagctttgaaattgcattataatgagctgggagcaaaggtaacagaaagaaagcaacagttggagaaatgcttgaaattgtcccgtaagatgcgaaaggaaatgaatgtcttgacagaatggctggcagctacagatatggaattgacaaagagatcagcagttgaaggaatgcctagtaatttggattctgaagttgcctggggaaaggctactcaaaaagagattgagaaacagaaggtgcacctgaagagtatcacagaggtaggagaggccttgaaaacagttttgggcaagaaggagacgttggtggaagataaactcagtcttctgaatagtaactggatagctgtcacctcccgagcagaagagtggttaaatcttttgttggaataccagaaacacatggaaacttttgaccagaatgtggaccacatcacaaagtggatcattcaggctgacacacttttggatgaatcagagaaaaagaaaccccagcaaaaagaagacgtgcttaagcgtttaaaggcagaactgaatgacatacgcccaaaggtggactctacacgtgaccaagcagcaaacttgatggcaaaccgcggtgaccactgcaggaaattagtagagccccaaatctcagagctcaaccatcgatttgcagccatttcacacagaattaagactggaaaggcctccattcctttgaaggaattggagcagtttaactcagatatacaaaaattgcttgaaccactggaggctgaaattcagcagggggtgaatctgaaagaggaagacttcaataaagatatgaatgaagacaatgagggtactgtaaaagaattgttgcaaagaggagacaacttacaacaaagaatcacagatgagagaaagcgagaggaaataaagataaaacagcagctgttacagacaaaacataatgctctcaaggatttgaggtctcaaagaagaaaaaaggctctagaaatttctcatcagtggtatcagtacaagaggcaggctgatgatctcctgaaatgcttggatgacattgaaaaaaaattagccagcctacctgagcccagagatgaaaggaaaataaaggaaattgatcgggaattgcagaagaagaaagaggagctgaatgcagtgcgtaggcaagctgagggcttgtctgaggatggggccgcaatggcagtggagccaactcagatccagctcagcaagcgctggcgggaaattgagagcaaatttgctcagtttcgaagactcaactttgcacaaattcacactgtccgtgaagaaacgatgatggtgatgactgaagacatgcctttggaaatttcttatgtgccttctacttatttgactgaaatcactcatgtctcacaagccctattagaagtggaacaacttctcaatgctcctgacctctgtgctaaggactttgaagatctctttaagcaagaggagtctctgaagaatataaaagatagtctacaacaaagctcaggtcggattgacattattcatagcaagaagacagcagcattgcaaagtgcaacgcctgtggaaagggtgaagctacaggaagctctctcccagcttgatttccaatgggaaaaagttaacaaaatgtacaaggaccgacaagggcgatttgacagatctgttgagaaatggcggcgttttcattatgatataaagatatttaatcagtggctaacagaagctgaacagtttctcagaaagacacaaattcctgagaattgggaacatgctaaatacaaatggtatcttaaggaactccaggatggcattgggcagcggcaaactgttgtcagaacattgaatgcaactggggaagaaataattcagcaatcctcaaaaacagatgccagtattctacaggaaaaattgggaagcctgaatctgcggtggcaggaggtctgcaaacagctgtcagacagaaaaaagaggctagaagaacaaaagaatatcttgtcagaatttcaaagagatttaaatgaatttgttttatggttggaggaagcagataacattgctagtatcccacttgaacctggaaaagagcagcaactaaaagaaaagcttgagcaagtcaagttactggtggaagagttgcccctgcgccagggaattctcaaacaattaaatgaaactggaggacccgtgcttgtaagtgctcccataagcccagaagagcaagataaacttgaaaataagctcaagcagacaaatctccagtggataaaggtttccagagctttacctgagaaacaaggagaaattgaagctcaaataaaagaccttgggcagcttgaaaaaaagcttgaagaccttgaagagcagttaaatcatctgctgctgtggttatctcctattaggaatcagttggaaatttataaccaaccaaaccaagaaggaccatttgacgttaaggaaactgaaatagcagttcaagctaaacaaccggatgtggaagagattttgtctaaagggcagcatttgtacaaggaaaaaccagccactcagccagtgaagaggaagttagaagatctgagctctgagtggaaggcggtaaaccgtttacttcaagagctgagggcaaagcagcctgacctagctcctggactgaccactattggagcctctcctactcagactgttactctggtgacacaacctgtggttactaaggaaactgccatctccaaactagaaatgccatcttccttgatgttggaggtacctgctctggcagatttcaaccgggcttggacagaacttaccgactggctttctctgcttgatcaagttataaaatcacagagggtgatggtgggtgaccttgaggatatcaacgagatgatcatcaagcagaaggcaacaatgcaggatttggaacagaggcgtccccagttggaagaactcattaccgctgcccaaaatttgaaaaacaagaccagcaatcaagaggctagaacaatcattacggatcgaattgaaagaattcagaatcagtgggatgaagtacaagaacaccttcagaaccggaggcaacagttgaatgaaatgttaaaggattcaacacaatggctggaagctaaggaagaagctgagcaggtcttaggacaggccagagccaagcttgagtcatggaaggagggtccctatacagtagatgcaatccaaaagaaaatcacagaaaccaagcagttggccaaagacctccgccagtggcagacaaatgtagatgtggcaaatgacttggccctgaaacttctccgggattattctgcagatgataccagaaaagtccacatgataacagagaatatcaatgcctcttggagaagcattcataaaagggtgagtgagcgagaggctgctttggaagaaactcatagattactgcaacagttccccctggacctggaaaagtttcttgcctggcttacagaagctgaaacaactgccaatgtcctacaggatgctacccgtaaggaaaggctcctagaagactccaagggagtaaaagagctgatgaaacaatggcaagacctccaaggtgaaattgaagctcacacagatgtttatcacaacctggatgaaaacagccaaaaaatcctgagatccctggaaggttccgatgatgcagtcctgttacaaagacgtttggataacatgaacttcaagtggagtgaacttcggaaaaagtctctcaacattaggtcccatttggaagccagttctgaccagtggaagcgtctgcacctttctctgcaggaacttctggtgtggctacagctgaaagatgatgaattaagccggcaggcacctattggaggcgactttccagcagttcagaagcagaacgatgtacatagggccttcaagagggaattgaaaactaaagaacctgtaatcatgagtactcttgagactgtacgaatatttctgacagagcagcctttggaaggactagagaaactctaccaggagcccagagagctgcctcctgaggagagagcccagaatgtcactcggcttctacgaaagcaggctgaggaggtcaatactgagtgggaaaaattgaacctgcactccgctgactggcagagaaaaatagatgagacccttgaaagactccgggaacttcaagaggccacggatgagctggacctcaagctgcgccaagctgaggtgatcaagggatcctggcagcccgtgggcgatctcctcattgactctctccaagatcacctcgagaaagtcaaggcacttcgaggagaaattgcgcctctgaaagagaacgtgagccacgtcaatgaccttgctcgccagcttaccactttgggcattcagctctcaccgtataacctcagcactctggaagacctgaacaccagatggaagcttctgcaggtggccgtcgaggaccgagtcaggcagctgcatgaagcccacagggactttggtccagcatctcagcactttctttccacgtctgtccagggtccctgggagagagccatctcgccaaacaaagtgccctactatatcaaccacgagactcaaacaacttgctgggaccatcccaaaatgacagagctctaccagtctttagctgacctgaataatgtcagattctcagcttataggactgccatgaaactccgaagactgcagaaggccctttgcttggatctcttgagcctgtcagctgcatgtgatgccttggaccagcacaacctcaagcaaaatgaccagcccatggatatcctgcagattattaattgtttgaccactatttatgaccgcctggagcaagagcacaacaatttggtcaacgtccctctctgcgtggatatgtgtctgaactggctgctgaatgtttatgatacgggacgaacagggaggatccgtgtcctgtcttttaaaactggcatcatttccctgtgtaaagcacatttggaagacaagtacagataccttttcaagcaagtggcaagttcaacaggattttgtgaccagcgcaggctgggcctccttctgcatgattctatccaaattccaagacagttgggtgaagttgcatcctttgggggcagtaacattgagccaagtgtccggagctgcttccaatttgctaataataagccagagatcgaagcggccctcttcctagactggatgagactggaaccccagtccatggtgtggctgcccgtcctgcacagagtggctgctgcagaaactgccaagcatcaggccaaatgtaacatctgcaaagagtgtccaatcattggattcaggtacaggagtctaaagcactttaattatgacatctgccaaagctgctttttttctggtcgagttgcaaaaggccataaaatgcactatcccatggtggaatattgcactccgactacatcaggagaagatgttcgagactttgccaaggtactaaaaaacaaatttcgaaccaaaaggtattttgcgaagcatccccgaatgggctacctgccagtgcagactgtcttagagggggacaacatggaaactcccgttactctgatcaacttctggccagtagattctgcgcctgcctcgtcccctcagctttcacacgatgatactcattcacgcattgaacattatgctagcaggctagcagaaatggaaaacagcaatggatcttatctaaatgatagcatctctcctaatgagagcatagatgatgaacatttgttaatccagcattactgccaaagtttgaaccaggactcccccctgagccagcctcgtagtcctgcccagatcttgatttccttagagagtgaggaaagaggggagctagagagaatcctagcagatcttgaggaagaaaacaggaatctgcaagcagaatatgaccgtctaaagcagcagcacgaacataaaggcctgtccccactgccgtcccctcctgaaatgatgcccacctctccccagagtccccgggatgctgagctcattgctgaggccaagctactgcgtcaacacaaaggccgcctggaagccaggatgcaaatcctggaagaccacaataaacagctggagtcacagttacacaggctaaggcagctgctggagcaaccccaggcagaggccaaagtgaatggcacaacggtgtcctctccttctacctctctacagaggtccgacagcagtcagcctatgctgctccgagtggttggcagtcaaacttcggactccatgggtgaggaagatcttctcagtcctccccaggacacaagcacagggttagaggaggtgatggagcaactcaacaactccttccctagttcaagaggacacaatgtaggaagtcttttccacatggcagatgatttgggcagagcgatggagtccttagtatcagtcatgacagatgaagaaggagcagaataaatgttttacaactcctgattcccgcatggtttttataatattcatacaacaaagaggattagacagtaagagtttacaagaaataaatctatatttttgtgaagggtagtggtattatactgtagatttcagtagtttctaagtctgttattgttttgttaacaatggcaggttttacacgtctatgcaattgtacaaaaaagttataagaaaactacatgtaaaatcttgatagctaaataacttgccatttctttatatggaacgcattttgggttgtttaaaaatttataacagttataaagaaagattgtaaactaaagtgtgctttataaaaaaaagttgtttataaaaacccctaaaaacaaaacaaacacacacacacacacatacacacacacacacaaaactttgaggcagcgcattgttttgcatccttttggcgtgatatccatatgaaattcatggctttttctttttttgcatattaaagataagacttcctctaccaccacaccaaatgactactacacactgctcatttgagaactgtcagctgagtggggcaggcttgagttttcatttcatatatctatatgtctataagtatataaatactatagttatatagataaagagatacgaatttctatagactgactttttccattttttaaatgttcatgtcacatcctaatagaaagaaattacttctagtcagtcatccaggcttacctgcttggtctagaatggatttttcccggagccggaagccaggaggaaactacaccacactaaaacattgtctacagctccagatgtttctcattttaaacaactttccactgacaacgaaagtaaagtaaagtattggatttttttaaagggaacatgtgaatgaatacacaggacttattatatcagagtgagtaatcggttggttggttgattgattgattgattgatacattcagcttcctgctgctagcaatgccacgatttagatttaatgatgcttcagtggaaatcaatcagaaggtattctgaccttgtgaacatcagaaggtattttttaactcccaagcagtagcaggacgatgatagggctggagggctatggattcccagcccatccctgtgaaggagtaggccactctttaagtgaaggattggatgattgttcataatacataaagttctctgtaattacaactaaattattatgccctcttctcacagtcaaaaggaactgggtggtttggtttttgttgcttttttagatttattgtcccatgtgggatgagtttttaaatgccacaagacataatttaaaataaataaactttgggaaaaggtgtaaaacagtagccccatcacatttgtgatactgacaggtatcaacccagaagcccatgaactgtgtttccatcctttgcatttctctgcgagtagttccacacaggtttgtaagtaagtaagaaagaaggcaaattgattcaaatgttacaaaaaaacccttcttggtggattagacaggttaaatatataaacaaacaaacaaaaattgctcaaaaaagaggagaaaagctcaagaggaaaagctaaggactggtaggaaaaagctttactctttcatgccattttatttctttttgatttttaaatcattcattcaatagataccaccgtgtgacctataattttgcaaatctgttacctctgacatcaagtgtaattagcttttggagagtgggctgacatcaagtgtaattagcttttggagagtgggttttgtccattattaataattaattaattaacatcaaacacggcttctcatgctatttctacctcactttggttttggggtgttcctgataattgtgcacacctgagttcacagcttcaccacttgtccattgcgttattttctttttcctttataattctttctttttccttcataattttcaaaagaaaacccaaagctctaaggtaacaaattaccaaattacatgaagatttggtttttgtcttgcatttttttcctttatgtgacgctggaccttttctttacccaaggatttttaaaactcagatttaaaacaaggggttactttacatcctactaagaagtttaagtaagtaagtttcattctaaaatcagaggtaaatagagtgcataaataattttgttttaatctttttgtttttcttttagacacattagctctggagtgagtctgtcataatatttgaacaaaaattgagagctttattgctgcattttaagcataattaatttggacattatttcgtgttgtgttctttataaccaccaagtattaaactgtaaatcataatgtaactgaagcataaacatcacatggcatgttttgtcattgttttcaggtactgagttcttacttgagtatcataatatattgtgttttaacaccaacactgtaacatttacgaattatttttttaaacttcagttttactgcattttcacaacatatcagacttcaccaaatatatgccttactattgtattatagtactgctttactgtgtatctcaataaagcacgcagttatgttacaaaaaagta

SEQ ID NO: 427 - protein, 3703 aa, Homo sapiens
MLWWEEVEDCYEREDVQKKTFTKWVNAQFSKFGKQHIENLFSDLQDGRRLLDLLEGLTGQKLPKEKGSTRVHALNNVNKALRVLQNNNVDLVNIGSTDIVDGNHKLTLGLIWNIILHWQVKNVMKNIMAGLQQTNSEKILLSWVRQSTRNYPQVNVINFTTSWSDGLALNALIHSHRPDLFDWNSVVCQQSATQRLEHAFNIARYQLGIEKLLDPEDVDTTYPDKKSILMYITSLFQVLPQQVSIEAIQEVEMLPRPPKVTKEEHFQLHHQMHYSQQITVSLAQGYERTSSPKPRFKSYAYTQAAYVTTSDPTRSPFPSQHLEAPEDKSFGSSLMESEVNLDRYQTALEEVLSWLLSAEDTLQAQGEISNDVEVVKDQFHTHEGYMMDLTAHQGRVGNILQLGSKLIGTGKLSEDEETEVQEQMNLLNSRWECLRVASMEKQSNLHRVLMDLQNQKLKELNDWLTKTEERTRKMEEEPLGPDLEDLKRQVQQHKVLQEDLEQEQVRVNSLTHMVVVVDESSGDHATAALEEQLKVLGDRWANICRWTEDRWVLLQDILLKWQRLTEEQCLFSAWLSEKEDAVNKIHTTGFKDQNEMLSSLQKLAVLKADLEKKKQSMGKLYSLKQDLLSTLKNKSVTQKTEAWLDNFARCWDNLVQKLEKSTAQISQAVTTTQPSLTQTTVMETVTTVTTREQILVKHAQEELPPPPPQKKRQITVDSEIRKRLDVDITELHSWITRSEAVLQSPEFAIFRKEGNFSDLKEKVNAIEREKAEKFRKLQDASRSAQALVEQMVNEGVNADSIKQASEQLNSRWIEFCQLLSERLNWLEYQNNIIAFYNQLQQLEQMTTTAENWLKIQPTTPSEPTAIKSQLKICKDEVNRLSDLQPQIERLKIQSIALKEKGQGPMFLDADFVAFTNHFKQVFSDVQAREKELQTIFDTLPPMRYQETMSAIRTWVQQSETKLSIPQLSVTDYEIMEQRLGELQALQSSLQEQQSGLYYLSTTVKEMSKKAPSEISRKYQSEFEEIEGRWKKLSSQLVEHCQKLEEQMNKLRKIQNHIQTLKKWMAEVDVFLKEEWPALGDSEILKKQLKQCRLLVSDIQTIQPSLNSVNEGGQKIKNEAEPEFASRLETELKELNTQWDHMCQQVYARKEALKGGLEKTVSLQKDLSEMHEWMTQAEEEYLERDFEYKTPDELQKAVEEMKRAKEEAQQKEAKVKLLTESVNSVIAQAPPVAQEALKKELETLTTNYQWLCTRLNGKCKTLEEVWACWHELLSYLEKANKWLNEVEFKLKTTENIPGGAEEISEVLDSLENLMRHSEDNPNQIRILAQTLTDGGVMDELINEELETFNSRWRELHEEAVRRQKLLEQSIQSAQETEKSLHLIQESLTFIDKQLAAYIADKVDAAQMPQEAQKIQSDLTSHEISLEEMKKHNQGKEAAQRVLSQIDVAQKKLQDVSMKFRLFQKPANFEQRLQESKMILDEVKMHLPALETKSVEQEVVQSQLNHCVNLYKSLSEVKSEVEMVIKTGRQIVQKKQTENPKELDERVTALKLHYNELGAKVTERKQQLEKCLKLSRKMRKEMNVLTEWLAATDMELTKRSAVEGMPSNLDSEVAWGKATQKEIEKQKVHLKSITEVGEALKTVLGKKETLVEDKLSLLNSNWIAVTSRAEEWLNLLLEYQKHMETFDQNVDHITKWIIQADTLLDESEKKKPQQKEDVLKRLKAELNDIRPKVDSTRDQAANLMANRGDHCRKLVEPQISELNHRFAAISHRIKTGKASIPLKELEQFNSDIQKLLEPLEAEIQQGVNLKEEDFNKDMNEDNEGTVKELLQRGDNLQQRITDERKREEIKIKQQLLQTKHNALKDLRSQRRKKALEISHQWYQYKRQADDLLKCLDDIEKKLASLPEPRDERKIKEIDRELQKKKEELNAVRRQAEGLSEDGAAMAVEPTQIQLSKRWREIESKFAQFRRLNFAQIHTVREETMMVMTEDMPLEISYVPSTYLTEITHVSQALLEVEQLLNAPDLCAKDFEDLFKQEESLKNIKDSLQQSSGRIDIIHSKKTAALQSATPVERVKLQEALSQLDFQWEKVNKMYKDRQGRFDRSVEKWRRFHYDIKIFNQWLTEAEQFLRKTQIPENWEHAKYKWYLKELQDGIGQRQTVVRTLNATGEEIIQQSSKTDASILQEKLGSLNLRWQEVCKQLSDRKKRLEEQKNILSEFQRDLNEFVLWLEEADNIASIPLEPGKEQQLKEKLEQVKLLVEELPLRQGILKQLNETGGPVLVSAPISPEEQDKLENKLKQTNLQWIKVSRALPEKQGEIEAQIKDLGQLEKKLEDLEEQLNHLLLWLSPIRNQLEIYNQPNQEGPFDVKETEIAVQAKQPDVEEILSKGQHLYKEKPATQPVKRKLEDLSSEWKAVNRLLQELRAKQPDLAPGLTTIGASPTQTVTLVTQPVVTKETAISKLEMPSSLMLEVPALADFNRAWTELTDWLSLLDQVIKSQRVMVGDLEDINEMIIKQKATMQDLEQRRPQLEELITAAQNLKNKTSNQEARTIITDRIERIQNQWDEVQEHLQNRRQQLNEMLKDSTQWLEAKEEAEQVLGQARAKLESWKEGPYTVDAIQKKITETKQLAKDLRQWQTNVDVANDLALKLLRDYSADDTRKVHMITENINASWRSIHKRVSEREAALEETHRLLQQFPLDLEKFLAWLTEAETTANVLQDATRKERLLEDSKGVKELMKQWQDLQGEIEAHTDVYHNLDENSQKILRSLEGSDDAVLLQRRLDNMNFKWSELRKKSLNIRSHLEASSDQWKRLHLSLQELLVWLQLKDDELSRQAPIGGDFPAVQKQNDVHRAFKRELKTKEPVIMSTLETVRIFLTEQPLEGLEKLYQEPRELPPEERAQNVTRLLRKQAEEVNTEWEKLNLHSADWQRKIDETLERLRELQEATDELDLKLRQAEVIKGSWQPVGDLLIDSLQDHLEKVKALRGEIAPLKENVSHVNDLARQLTTLGIQLSPYNLSTLEDLNTRWKLLQVAVEDRVRQLHEAHRDFGPASQHFLSTSVQGPWERAISPNKVPYYINHETQTTCWDHPKMTELYQSLADLNNVRFSAYRTAMKLRRLQKALCLDLLSLSAACDALDQHNLKQNDQPMDILQIINCLTTIYDRLEQEHNNLVNVPLCVDMCLNWLLNVYDTGRTGRIRVLSFKTGIISLCKAHLEDKYRYLFKQVASSTGFCDQRRLGLLLHDSIQIPRQLGEVASFGGSNIEPSVRSCFQFANNKPEIEAALFLDWMRLEPQSMVWLPVLHRVAAAETAKHQAKCNICKECPIIGFRYRSLKHFNYDICQSCFFSGRVAKGHKMHYPMVEYCTPTTSGEDVRDFAKVLKNKFRTKRYFAKHPRMGYLPVQTVLEGDNMETPVTLINFWPVDSAPASSPQLSHDDTHSRIEHYASRLAEMENSNGSYLNDSISPNESIDDEHLLIQHYCQSLNQDSPLSQPRSPAQILISLESEERGELERILADLEEENRNLQAEYDRLKQQHEHKGLSPLPSPPEMMPTSPQSPRDAELIAEAKLLRQHKGRLEARMQILEDHNKQLESQLHRLRQLLEQPQAEAKVNGTTVSSPSTSLQRSDSSQPMLLRVVGSQTSDSMGEEDLLSPPQDTSTGLEEVMEQLNNSFPSSRGHNVGSLFHMADDLGRAMESLVSVMTDEEGAE

SEQ ID NO: 428 - DNA, 8499 bp, Homo sapiens
tttcatcagagcatcttcacacatcagtgttcactctctatagatttatttgcatattgtctaaatatgtttttttctgttattattttacactttttattttgcttcattctctgttgagttcctcaaacctttaaaaaggaaataaataacttattcacttaccctctaaattatattctatgtggacggtccctaataaataatgagttatcactccaaattgtttcaaatcccaagacaccagaggaatttagaagaaagaaaatgttagaccaatttcaatatttacttaattagaatatctaaaaccaagcattcaaaggataactgaaataatatttgggttattgagcgaggatgacagtcatgcctttcatatttgtaaacttcaaaggatgacaataaagggacaacagcctttgaaattttgagagaagtatttgctgcttgcaagtcggttgatgtggttagctaactgccctgggccctgtattggttttgctcaataggaaattgatcgggaattgcagaagaagaaagaggagctgaatgcagtgcgtaggcaagctgagggcttgtctgaggatggggccgcaatggcagtggagccaactcagatccagctcagcaagcgctggcgggaaattgagagcaaatttgctcagtttcgaagactcaactttgcacaaattcacactgtccgtgaagaaacgatgatggtgatgactgaagacatgcctttggaaatttcttatgtgccttctacttatttgactgaaatcactcatgtctcacaagccctattagaagtggaacaacttctcaatgctcctgacctctgtgctaaggactttgaagatctctttaagcaagaggagtctctgaagaatataaaagatagtctacaacaaagctcaggtcggattgacattattcatagcaagaagacagcagcattgcaaagtgcaacgcctgtggaaagggtgaagctacaggaagctctctcccagcttgatttccaatgggaaaaagttaacaaaatgtacaaggaccgacaagggcgatttgacagatctgttgagaaatggcggcgttttcattatgatataaagatatttaatcagtggctaacagaagctgaacagtttctcagaaagacacaaattcctgagaattgggaacatgctaaatacaaatggtatcttaaggaactccaggatggcattgggcagcggcaaactgttgtcagaacattgaatgcaactggggaagaaataattcagcaatcctcaaaaacagatgccagtattctacaggaaaaattgggaagcctgaatctgcggtggcaggaggtctgcaaacagctgtcagacagaaaaaagaggctagaagaacaaaagaatatcttgtcagaatttcaaagagatttaaatgaatttgttttatggttggaggaagcagataacattgctagtatcccacttgaacctggaaaagagcagcaactaaaagaaaagcttgagcaagtcaagttactggtggaagagttgcccctgcgccagggaattctcaaacaattaaatgaaactggaggacccgtgcttgtaagtgctcccataagcccagaagagcaagataaacttgaaaataagctcaagcagacaaatctccagtggataaaggtttccagagctttacctgagaaacaaggagaaattgaagctcaaataaaagaccttgggcagcttgaaaaaaagcttgaagaccttgaagagcagttaaatcatctgctgctgtggttatctcctattaggaatcagttggaaatttataaccaaccaaaccaagaaggaccatttgacgttaaggaaactgaaatagcagttcaagctaaacaaccggatgtggaagagattttgtctaaagggcagcatttgtacaaggaaaaaccagccactcagccagtgaagaggaagttagaagatctgagctctgagtggaaggcggtaaaccgtttacttcaagagctgagggcaaagcagcctgacctagctcctggactgaccactattggagcctctcctactcagactgttactctggtgacacaacctgtggttactaaggaaactgccatctccaaactagaaatgccatcttccttgatgttggaggtacctgctctggcagatttcaaccgggcttggacagaacttaccgactggctttctctgcttgatcaagttataaaatcacagagggtgatggtgggtgaccttgaggatatcaacgagatgatcatcaagcagaaggcaacaatgcaggatttggaacagaggcgtccccagttggaagaactcattaccgctgcccaaaatttgaaaaacaagaccagcaatcaagaggctagaacaatcattacggatcgaattgaaagaattcagaatcagtgggatgaagtacaagaacaccttcagaaccggaggcaacagttgaatgaaatgttaaaggattcaacacaatggctggaagctaaggaagaagctgagcaggtcttaggacaggccagagccaagcttgagtcatggaaggagggtccctatacagtagatgcaatccaaaagaaaatcacagaaaccaagcagttggccaaagacctccgccagtggcagacaaatgtagatgtggcaaatgacttggccctgaaacttctccgggattattctgcagatgataccagaaaagtccacatgataacagagaatatcaatgcctcttggagaagcattcataaaagggtgagtgagcgagaggctgctttggaagaaactcatagattactgcaacagttccccctggacctggaaaagtttcttgcctggcttacagaagctgaaacaactgccaatgtcctacaggatgctacccgtaaggaaaggctcctagaagactccaagggagtaaaagagctgatgaaacaatggcaagacctccaaggtgaaattgaagctcacacagatgtttatcacaacctggatgaaaacagccaaaaaatcctgagatccctggaaggttccgatgatgcagtcctgttacaaagacgtttggataacatgaacttcaagtggagtgaacttcggaaaaagtctctcaacattaggtcccatttggaagccagttctgaccagtggaagcgtctgcacctttctctgcaggaacttctggtgtggctacagctgaaagatgatgaattaagccggcaggcacctattggaggcgactttccagcagttcagaagcagaacgatgtacatagggccttcaagagggaattgaaaactaaagaacctgtaatcatgagtactcttgagactgtacgaatatttctgacagagcagcctttggaaggactagagaaactctaccaggagcccagagagctgcctcctgaggagagagcccagaatgtcactcggcttctacgaaagcaggctgaggaggtcaatactgagtgggaaaaattgaacctgcactccgctgactggcagagaaaaatagatgagacccttgaaagactccgggaacttcaagaggccacggatgagctggacctcaagctgcgccaagctgaggtgatcaagggatcctggcagcccgtgggcgatctcctcattgactctctccaagatcacctcgagaaagtcaaggcacttcgaggagaaattgcgcctctgaaagagaacgtgagccacgtcaatgaccttgctcgccagcttaccactttgggcattcagctctcaccgtataacctcagcactctggaagacctgaacaccagatggaagcttctgcaggtggccgtcgaggaccgagtcaggcagctgcatgaagcccacagggactttggtccagcatctcagcactttctttccacgtctgtccagggtccctgggagagagccatctcgccaaacaaagtgccctactatatcaaccacgagactcaaacaacttgctgggaccatcccaaaatgacagagctctaccagtctttagctgacctgaataatgtcagattctcagcttataggactgccatgaaactccgaagactgcagaaggccctttgcttggatctcttgagcctgtcagctgcatgtgatgccttggaccagcacaacctcaagcaaaatgaccagcccatggatatcctgcagattattaattgtttgaccactatttatgaccgcctggagcaagagcacaacaatttggtcaacgtccctctctgcgtggatatgtgtctgaactggctgctgaatgtttatgatacgggacgaacagggaggatccgtgtcctgtcttttaaaactggcatcatttccctgtgtaaagcacatttggaagacaagtacagataccttttcaagcaagtggcaagttcaacaggattttgtgaccagcgcaggctgggcctccttctgcatgattctatccaaattccaagacagttgggtgaagttgcatcctttgggggcagtaacattgagccaagtgtccggagctgcttccaatttgctaataataagccagagatcgaagcggccctcttcctagactggatgagactggaaccccagtccatggtgtggctgcccgtcctgcacagagtggctgctgcagaaactgccaagcatcaggccaaatgtaacatctgcaaagagtgtccaatcattggattcaggtacaggagtctaaagcactttaattatgacatctgccaaagctgctttttttctggtcgagttgcaaaaggccataaaatgcactatcccatggtggaatattgcactccgactacatcaggagaagatgttcgagactttgccaaggtactaaaaaacaaatttcgaaccaaaaggtattttgcgaagcatccccgaatgggctacctgccagtgcagactgtcttagagggggacaacatggaaactcccgttactctgatcaacttctggccagtagattctgcgcctgcctcgtcccctcagctttcacacgatgatactcattcacgcattgaacattatgctagcaggctagcagaaatggaaaacagcaatggatcttatctaaatgatagcatctctcctaatgagagcatagatgatgaacatttgttaatccagcattactgccaaagtttgaaccaggactcccccctgagccagcctcgtagtcctgcccagatcttgatttccttagagagtgaggaaagaggggagctagagagaatcctagcagatcttgaggaagaaaacaggaatctgcaagcagaatatgaccgtctaaagcagcagcacgaacataaaggcctgtccccactgccgtcccctcctgaaatgatgcccacctctccccagagtccccgggatgctgagctcattgctgaggccaagctactgcgtcaacacaaaggccgcctggaagccaggatgcaaatcctggaagaccacaataaacagctggagtcacagttacacaggctaaggcagctgctggagcaaccccaggcagaggccaaagtgaatggcacaacggtgtcctctccttctacctctctacagaggtccgacagcagtcagcctatgctgctccgagtggttggcagtcaaacttcggactccatgggtgaggaagatcttctcagtcctccccaggacacaagcacagggttagaggaggtgatggagcaactcaacaactccttccctagttcaagaggacacaatgtaggaagtcttttccacatggcagatgatttgggcagagcgatggagtccttagtatcagtcatgacagatgaagaaggagcagaataaatgttttacaactcctgattcccgcatggtttttataatattcatacaacaaagaggattagacagtaagagtttacaagaaataaatctatatttttgtgaagggtagtggtattatactgtagatttcagtagtttctaagtctgttattgttttgttaacaatggcaggttttacacgtctatgcaattgtacaaaaaagttataagaaaactacatgtaaaatcttgatagctaaataacttgccatttctttatatggaacgcattttgggttgtttaaaaatttataacagttataaagaaagattgtaaactaaagtgtgctttataaaaaaaagttgtttataaaaacccctaaaaacaaaacaaacacacacacacacacatacacacacacacacaaaactttgaggcagcgcattgttttgcatccttttggcgtgatatccatatgaaattcatggctttttctttttttgcatattaaagataagacttcctctaccaccacaccaaatgactactacacactgctcatttgagaactgtcagctgagtggggcaggcttgagttttcatttcatatatctatatgtctataagtatataaatactatagttatatagataaagagatacgaatttctatagactgactttttccattttttaaatgttcatgtcacatcctaatagaaagaaattacttctagtcagtcatccaggcttacctgcttggtctagaatggatttttcccggagccggaagccaggaggaaactacaccacactaaaacattgtctacagctccagatgtttctcattttaaacaactttccactgacaacgaaagtaaagtaaagtattggatttttttaaagggaacatgtgaatgaatacacaggacttattatatcagagtgagtaatcggttggttggttgattgattgattgattgatacattcagcttcctgctgctagcaatgccacgatttagatttaatgatgcttcagtggaaatcaatcagaaggtattctgaccttgtgaacatcagaaggtattttttaactcccaagcagtagcaggacgatgatagggctggagggctatggattcccagcccatccctgtgaaggagtaggccactctttaagtgaaggattggatgattgttcataatacataaagttctctgtaattacaactaaattattatgccctcttctcacagtcaaaaggaactgggtggtttggtttttgttgcttttttagatttattgtcccatgtgggatgagtttttaaatgccacaagacataatttaaaataaataaactttgggaaaaggtgtaaaacagtagccccatcacatttgtgatactgacaggtatcaacccagaagcccatgaactgtgtttccatcctttgcatttctctgcgagtagttccacacaggtttgtaagtaagtaagaaagaaggcaaattgattcaaatgttacaaaaaaacccttcttggtggattagacaggttaaatatataaacaaacaaacaaaaattgctcaaaaaagaggagaaaagctcaagaggaaaagctaaggactggtaggaaaaagctttactctttcatgccattttatttctttttgatttttaaatcattcattcaatagataccaccgtgtgacctataattttgcaaatctgttacctctgacatcaagtgtaattagcttttggagagtgggctgacatcaagtgtaattagcttttggagagtgggttttgtccattattaataattaattaattaacatcaaacacggcttctcatgctatttctacctcactttggttttggggtgttcctgataattgtgcacacctgagttcacagcttcaccacttgtccattgcgttattttctttttcctttataattctttctttttccttcataattttcaaaagaaaacccaaagctctaaggtaacaaattaccaaattacatgaagatttggtttttgtcttgcatttttttcctttatgtgacgctggaccttttctttacccaaggatttttaaaactcagatttaaaacaaggggttactttacatcctactaagaagtttaagtaagtaagtttcattctaaaatcagaggtaaatagagtgcataaataattttgttttaatctttttgtttttcttttagacacattagctctggagtgagtctgtcataatatttgaacaaaaattgagagctttattgctgcattttaagcataattaatttggacattatttcgtgttgtgttctttataaccaccaagtattaaactgtaaatcataatgtaactgaagcataaacatcacatggcatgttttgtcattgttttcaggtactgagttcttacttgagtatcataatatattgtgttttaacaccaacactgtaacatttacgaattatttttttaaacttcagttttactgcattttcacaacatatcagacttcaccaaatatatgccttactattgtattatagtactgctttactgtgtatctcaataaagcacgcagttatgttacaaaaaagta

SEQ ID NO: 429 - protein, 1761 aa, Homo sapiens
MAVEPTQIQLSKRWREIESKFAQFRRLNFAQIHTVREETMMVMTEDMPLEISYVPSTYLTEITHVSQALLEVEQLLNAPDLCAKDFEDLFKQEESLKNIKDSLQQSSGRIDIIHSKKTAALQSATPVERVKLQEALSQLDFQWEKVNKMYKDRQGRFDRSVEKWRRFHYDIKIFNQWLTEAEQFLRKTQIPENWEHAKYKWYLKELQDGIGQRQTVVRTLNATGEEIIQQSSKTDASILQEKLGSLNLRWQEVCKQLSDRKKRLEEQKNILSEFQRDLNEFVLWLEEADNIASIPLEPGKEQQLKEKLEQVKLLVEELPLRQGILKQLNETGGPVLVSAPISPEEQDKLENKLKQTNLQWIKVSRALPEKQGEIEAQIKDLGQLEKKLEDLEEQLNHLLLWLSPIRNQLEIYNQPNQEGPFDVKETEIAVQAKQPDVEEILSKGQHLYKEKPATQPVKRKLEDLSSEWKAVNRLLQELRAKQPDLAPGLTTIGASPTQTVTLVTQPVVTKETAISKLEMPSSLMLEVPALADFNRAWTELTDWLSLLDQVIKSQRVMVGDLEDINEMIIKQKATMQDLEQRRPQLEELITAAQNLKNKTSNQEARTIITDRIERIQNQWDEVQEHLQNRRQQLNEMLKDSTQWLEAKEEAEQVLGQARAKLESWKEGPYTVDAIQKKITETKQLAKDLRQWQTNVDVANDLALKLLRDYSADDTRKVHMITENINASWRSIHKRVSEREAALEETHRLLQQFPLDLEKFLAWLTEAETTANVLQDATRKERLLEDSKGVKELMKQWQDLQGEIEAHTDVYHNLDENSQKILRSLEGSDDAVLLQRRLDNMNFKWSELRKKSLNIRSHLEASSDQWKRLHLSLQELLVWLQLKDDELSRQAPIGGDFPAVQKQNDVHRAFKRELKTKEPVIMSTLETVRIFLTEQPLEGLEKLYQEPRELPPEERAQNVTRLLRKQAEEVNTEWEKLNLHSADWQRKIDETLERLRELQEATDELDLKLRQAEVIKGSWQPVGDLLIDSLQDHLEKVKALRGEIAPLKENVSHVNDLARQLTTLGIQLSPYNLSTLEDLNTRWKLLQVAVEDRVRQLHEAHRDFGPASQHFLSTSVQGPWERAISPNKVPYYINHETQTTCWDHPKMTELYQSLADLNNVRFSAYRTAMKLRRLQKALCLDLLSLSAACDALDQHNLKQNDQPMDILQIINCLTTIYDRLEQEHNNLVNVPLCVDMCLNWLLNVYDTGRTGRIRVLSFKTGIISLCKAHLEDKYRYLFKQVASSTGFCDQRRLGLLLHDSIQIPRQLGEVASFGGSNIEPSVRSCFQFANNKPEIEAALFLDWMRLEPQSMVWLPVLHRVAAAETAKHQAKCNICKECPIIGFRYRSLKHFNYDICQSCFFSGRVAKGHKMHYPMVEYCTPTTSGEDVRDFAKVLKNKFRTKRYFAKHPRMGYLPVQTVLEGDNMETPVTLINFWPVDSAPASSPQLSHDDTHSRIEHYASRLAEMENSNGSYLNDSISPNESIDDEHLLIQHYCQSLNQDSPLSQPRSPAQILISLESEERGELERILADLEEENRNLQAEYDRLKQQHEHKGLSPLPSPPEMMPTSPQSPRDAELIAEAKLLRQHKGRLEARMQILEDHNKQLESQLHRLRQLLEQPQAEAKVNGTTVSSPSTSLQRSDSSQPMLLRVVGSQTSDSMGEEDLLSPPQDTSTGLEEVMEQLNNSFPSSRGHNVGSLFHMADDLGRAMESLVSVMTDEEGAE

SEQ ID NO: 430 - DNA, 13875 bp, Homo sapiens
actttccccctacaggactcagatctgggaggcaattaccttcggagaaaaacgaataggaaaaactgaagtgttactttttttaaagctgctgaagtttgttggtttctcattgtttttaagcctactggagcaataaagtttgaagaacttttaccaggttttttttatcgctgccttgatatacacttttcaaaatgctttggtgggaagaagtagaggactgttatgaaagagaagatgttcaaaagaaaacattcacaaaatgggtaaatgcacaattttctaagtttgggaagcagcatattgagaacctcttcagtgacctacaggatgggaggcgcctcctagacctcctcgaaggcctgacagggcaaaaactgccaaaagaaaaaggatccacaagagttcatgccctgaacaatgtcaacaaggcactgcgggttttgcagaacaataatgttgatttagtgaatattggaagtactgacatcgtagatggaaatcataaactgactcttggtttgatttggaatataatcctccactggcaggtcaaaaatgtaatgaaaaatatcatggctggattgcaacaaaccaacagtgaaaagattctcctgagctgggtccgacaatcaactcgtaattatccacaggttaatgtaatcaacttcaccaccagctggtctgatggcctggctttgaatgctctcatccatagtcataggccagacctatttgactggaatagtgtggtttgccagcagtcagccacacaacgactggaacatgcattcaacatcgccagatatcaattaggcatagagaaactactcgatcctgaagatgttgataccacctatccagataagaagtccatcttaatgtacatcacatcactcttccaagttttgcctcaacaagtgagcattgaagccatccaggaagtggaaatgttgccaaggccacctaaagtgactaaagaagaacattttcagttacatcatcaaatgcactattctcaacagatcacggtcagtctagcacagggatatgagagaacttcttcccctaagcctcgattcaagagctatgcctacacacaggctgcttatgtcaccacctctgaccctacacggagcccatttccttcacagcatttggaagctcctgaagacaagtcatttggcagttcattgatggagagtgaagtaaacctggaccgttatcaaacagctttagaagaagtattatcgtggcttctttctgctgaggacacattgcaagcacaaggagagatttctaatgatgtggaagtggtgaaagaccagtttcatactcatgaggggtacatgatggatttgacagcccatcagggccgggttggtaatattctacaattgggaagtaagctgattggaacaggaaaattatcagaagatgaagaaactgaagtacaagagcagatgaatctcctaaattcaagatgggaatgcctcagggtagctagcatggaaaaacaaagcaatttacatagagttttaatggatctccagaatcagaaactgaaagagttgaatgactggctaacaaaaacagaagaaagaacaaggaaaatggaggaagagcctcttggacctgatcttgaagacctaaaacgccaagtacaacaacataaggtgcttcaagaagatctagaacaagaacaagtcagggtcaattctctcactcacatggtggtggtagttgatgaatctagtggagatcacgcaactgctgctttggaagaacaacttaaggtattgggagatcgatgggcaaacatctgtagatggacagaagaccgctgggttcttttacaagacatccttctcaaatggcaacgtcttactgaagaacagtgcctttttagtgcatggctttcagaaaaagaagatgcagtgaacaagattcacacaactggctttaaagatcaaaatgaaatgttatcaagtcttcaaaaactggccgttttaaaagcggatctagaaaagaaaaagcaatccatgggcaaactgtattcactcaaacaagatcttctttcaacactgaagaataagtcagtgacccagaagacggaagcatggctggataactttgcccggtgttgggataatttagtccaaaaacttgaaaagagtacagcacagatttcacaggctgtcaccaccactcagccatcactaacacagacaactgtaatggaaacagtaactacggtgaccacaagggaacagatcctggtaaagcatgctcaagaggaacttccaccaccacctccccaaaagaagaggcagattactgtggattctgaaattaggaaaaggttggatgttgatataactgaacttcacagctggattactcgctcagaagctgtgttgcagagtcctgaatttgcaatctttcggaaggaaggcaacttctcagacttaaaagaaaaagtcaatgccatagagcgagaaaaagctgagaagttcagaaaactgcaagatgccagcagatcagctcaggccctggtggaacagatggtgaatgagggtgttaatgcagatagcatcaaacaagcctcagaacaactgaacagccggtggatcgaattctgccagttgctaagtgagagacttaactggctggagtatcagaacaacatcatcgctttctataatcagctacaacaattggagcagatgacaactactgctgaaaactggttgaaaatccaacccaccaccccatcagagccaacagcaattaaaagtcagttaaaaatttgtaaggatgaagtcaaccggctatcagatcttcaacctcaaattgaacgattaaaaattcaaagcatagccctgaaagagaaaggacaaggacccatgttcctggatgcagactttgtggcctttacaaatcattttaagcaagtcttttctgatgtgcaggccagagagaaagagctacagacaatttttgacactttgccaccaatgcgctatcaggagaccatgagtgccatcaggacatgggtccagcagtcagaaaccaaactctccatacctcaacttagtgtcaccgactatgaaatcatggagcagagactcggggaattgcaggctttacaaagttctctgcaagagcaacaaagtggcctatactatctcagcaccactgtgaaagagatgtcgaagaaagcgccctctgaaattagccggaaatatcaatcagaatttgaagaaattgagggacgctggaagaagctctcctcccagctggttgagcattgtcaaaagctagaggagcaaatgaataaactccgaaaaattcagaatcacatacaaaccctgaagaaatggatggctgaagttgatgtttttctgaaggaggaatggcctgcccttggggattcagaaattctaaaaaagcagctgaaacagtgcagacttttagtcagtgatattcagacaattcagcccagtctaaacagtgtcaatgaaggtgggcagaagataaagaatgaagcagagccagagtttgcttcgagacttgagacagaactcaaagaacttaacactcagtgggatcacatgtgccaacaggtctatgccagaaaggaggccttgaagggaggtttggagaaaactgtaagcctccagaaagatctatcagagatgcacgaatggatgacacaagctgaagaagagtatcttgagagagattttgaatataaaactccagatgaattacagaaagcagttgaagagatgaagagagctaaagaagaggcccaacaaaaagaagcgaaagtgaaactccttactgagtctgtaaatagtgtcatagctcaagctccacctgtagcacaagaggccttaaaaaaggaacttgaaactctaaccaccaactaccagtggctctgcactaggctgaatgggaaatgcaagactttggaagaagtttgggcatgttggcatgagttattgtcatacttggagaaagcaaacaagtggctaaatgaagtagaatttaaacttaaaaccactgaaaacattcctggcggagctgaggaaatctctgaggtgctagattcacttgaaaatttgatgcgacattcagaggataacccaaatcagattcgcatattggcacagaccctaacagatggcggagtcatggatgagctaatcaatgaggaacttgagacatttaattctcgttggagggaactacatgaagaggctgtaaggaggcaaaagttgcttgaacagagcatccagtctgcccaggagactgaaaaatccttacacttaatccaggagtccctcacattcattgacaagcagttggcagcttatattgcagacaaggtggacgcagctcaaatgcctcaggaagcccagaaaatccaatctgatttgacaagtcatgagatcagtttagaagaaatgaagaaacataatcaggggaaggaggctgcccaaagagtcctgtctcagattgatgttgcacagaaaaaattacaagatgtctccatgaagtttcgattattccagaaaccagccaattttgagcagcgtctacaagaaagtaagatgattttagatgaagtgaagatgcacttgcctgcattggaaacaaagagtgtggaacaggaagtagtacagtcacagctaaatcattgtgtgaacttgtataaaagtctgagtgaagtgaagtctgaagtggaaatggtgataaagactggacgtcagattgtacagaaaaagcagacggaaaatcccaaagaacttgatgaaagagtaacagctttgaaattgcattataatgagctgggagcaaaggtaacagaaagaaagcaacagttggagaaatgcttgaaattgtcccgtaagatgcgaaaggaaatgaatgtcttgacagaatggctggcagctacagatatggaattgacaaagagatcagcagttgaaggaatgcctagtaatttggattctgaagttgcctggggaaaggctactcaaaaagagattgagaaacagaaggtgcacctgaagagtatcacagaggtaggagaggccttgaaaacagttttgggcaagaaggagacgttggtggaagataaactcagtcttctgaatagtaactggatagctgtcacctcccgagcagaagagtggttaaatcttttgttggaataccagaaacacatggaaacttttgaccagaatgtggaccacatcacaaagtggatcattcaggctgacacacttttggatgaatcagagaaaaagaaaccccagcaaaaagaagacgtgcttaagcgtttaaaggcagaactgaatgacatacgcccaaaggtggactctacacgtgaccaagcagcaaacttgatggcaaaccgcggtgaccactgcaggaaattagtagagccccaaatctcagagctcaaccatcgatttgcagccatttcacacagaattaagactggaaaggcctccattcctttgaaggaattggagcagtttaactcagatatacaaaaattgcttgaaccactggaggctgaaattcagcagggggtgaatctgaaagaggaagacttcaataaagatatgaatgaagacaatgagggtactgtaaaagaattgttgcaaagaggagacaacttacaacaaagaatcacagatgagagaaagcgagaggaaataaagataaaacagcagctgttacagacaaaacataatgctctcaaggatttgaggtctcaaagaagaaaaaaggctctagaaatttctcatcagtggtatcagtacaagaggcaggctgatgatctcctgaaatgcttggatgacattgaaaaaaaattagccagcctacctgagcccagagatgaaaggaaaataaaggaaattgatcgggaattgcagaagaagaaagaggagctgaatgcagtgcgtaggcaagctgagggcttgtctgaggatggggccgcaatggcagtggagccaactcagatccagctcagcaagcgctggcgggaaattgagagcaaatttgctcagtttcgaagactcaactttgcacaaattcacactgtccgtgaagaaacgatgatggtgatgactgaagacatgcctttggaaatttcttatgtgccttctacttatttgactgaaatcactcatgtctcacaagccctattagaagtggaacaacttctcaatgctcctgacctctgtgctaaggactttgaagatctctttaagcaagaggagtctctgaagaatataaaagatagtctacaacaaagctcaggtcggattgacattattcatagcaagaagacagcagcattgcaaagtgcaacgcctgtggaaagggtgaagctacaggaagctctctcccagcttgatttccaatgggaaaaagttaacaaaatgtacaaggaccgacaagggcgatttgacagatctgttgagaaatggcggcgttttcattatgatataaagatatttaatcagtggctaacagaagctgaacagtttctcagaaagacacaaattcctgagaattgggaacatgctaaatacaaatggtatcttaaggaactccaggatggcattgggcagcggcaaactgttgtcagaacattgaatgcaactggggaagaaataattcagcaatcctcaaaaacagatgccagtattctacaggaaaaattgggaagcctgaatctgcggtggcaggaggtctgcaaacagctgtcagacagaaaaaagaggctagaagaacaaaagaatatcttgtcagaatttcaaagagatttaaatgaatttgttttatggttggaggaagcagataacattgctagtatcccacttgaacctggaaaagagcagcaactaaaagaaaagcttgagcaagtcaagttactggtggaagagttgcccctgcgccagggaattctcaaacaattaaatgaaactggaggacccgtgcttgtaagtgctcccataagcccagaagagcaagataaacttgaaaataagctcaagcagacaaatctccagtggataaaggtttccagagctttacctgagaaacaaggagaaattgaagctcaaataaaagaccttgggcagcttgaaaaaaagcttgaagaccttgaagagcagttaaatcatctgctgctgtggttatctcctattaggaatcagttggaaatttataaccaaccaaaccaagaaggaccatttgacgttaaggaaactgaaatagcagttcaagctaaacaaccggatgtggaagagattttgtctaaagggcagcatttgtacaaggaaaaaccagccactcagccagtgaagaggaagttagaagatctgagctctgagtggaaggcggtaaaccgtttacttcaagagctgagggcaaagcagcctgacctagctcctggactgaccactattggagcctctcctactcagactgttactctggtgacacaacctgtggttactaaggaaactgccatctccaaactagaaatgccatcttccttgatgttggaggtacctgctctggcagatttcaaccgggcttggacagaacttaccgactggctttctctgcttgatcaagttataaaatcacagagggtgatggtgggtgaccttgaggatatcaacgagatgatcatcaagcagaaggcaacaatgcaggatttggaacagaggcgtccccagttggaagaactcattaccgctgcccaaaatttgaaaaacaagaccagcaatcaagaggctagaacaatcattacggatcgaattgaaagaattcagaatcagtgggatgaagtacaagaacaccttcagaaccggaggcaacagttgaatgaaatgttaaaggattcaacacaatggctggaagctaaggaagaagctgagcaggtcttaggacaggccagagccaagcttgagtcatggaaggagggtccctatacagtagatgcaatccaaaagaaaatcacagaaaccaagcagttggccaaagacctccgccagtggcagacaaatgtagatgtggcaaatgacttggccctgaaacttctccgggattattctgcagatgataccagaaaagtccacatgataacagagaatatcaatgcctcttggagaagcattcataaaagggtgagtgagcgagaggctgctttggaagaaactcatagattactgcaacagttccccctggacctggaaaagtttcttgcctggcttacagaagctgaaacaactgccaatgtcctacaggatgctacccgtaaggaaaggctcctagaagactccaagggagtaaaagagctgatgaaacaatggcaagacctccaaggtgaaattgaagctcacacagatgtttatcacaacctggatgaaaacagccaaaaaatcctgagatccctggaaggttccgatgatgcagtcctgttacaaagacgtttggataacatgaacttcaagtggagtgaacttcggaaaaagtctctcaacattaggtcccatttggaagccagttctgaccagtggaagcgtctgcacctttctctgcaggaacttctggtgtggctacagctgaaagatgatgaattaagccggcaggcacctattggaggcgactttccagcagttcagaagcagaacgatgtacatagggccttcaagagggaattgaaaactaaagaacctgtaatcatgagtactcttgagactgtacgaatatttctgacagagcagcctttggaaggactagagaaactctaccaggagcccagagagctgcctcctgaggagagagcccagaatgtcactcggcttctacgaaagcaggctgaggaggtcaatactgagtgggaaaaattgaacctgcactccgctgactggcagagaaaaatagatgagacccttgaaagactccgggaacttcaagaggccacggatgagctggacctcaagctgcgccaagctgaggtgatcaagggatcctggcagcccgtgggcgatctcctcattgactctctccaagatcacctcgagaaagtcaaggcacttcgaggagaaattgcgcctctgaaagagaacgtgagccacgtcaatgaccttgctcgccagcttaccactttgggcattcagctctcaccgtataacctcagcactctggaagacctgaacaccagatggaagcttctgcaggtggccgtcgaggaccgagtcaggcagctgcatgaagcccacagggactttggtccagcatctcagcactttctttccacgtctgtccagggtccctgggagagagccatctcgccaaacaaagtgccctactatatcaaccacgagactcaaacaacttgctgggaccatcccaaaatgacagagctctaccagtctttagctgacctgaataatgtcagattctcagcttataggactgccatgaaactccgaagactgcagaaggccctttgcttggatctcttgagcctgtcagctgcatgtgatgccttggaccagcacaacctcaagcaaaatgaccagcccatggatatcctgcagattattaattgtttgaccactatttatgaccgcctggagcaagagcacaacaatttggtcaacgtccctctctgcgtggatatgtgtctgaactggctgctgaatgtttatgatacgggacgaacagggaggatccgtgtcctgtcttttaaaactggcatcatttccctgtgtaaagcacatttggaagacaagtacagataccttttcaagcaagtggcaagttcaacaggattttgtgaccagcgcaggctgggcctccttctgcatgattctatccaaattccaagacagttgggtgaagttgcatcctttgggggcagtaacattgagccaagtgtccggagctgcttccaatttgctaataataagccagagatcgaagcggccctcttcctagactggatgagactggaaccccagtccatggtgtggctgcccgtcctgcacagagtggctgctgcagaaactgccaagcatcaggccaaatgtaacatctgcaaagagtgtccaatcattggattcaggtacaggagtctaaagcactttaattatgacatctgccaaagctgctttttttctggtcgagttgcaaaaggccataaaatgcactatcccatggtggaatattgcactccgactacatcaggagaagatgttcgagactttgccaaggtactaaaaaacaaatttcgaaccaaaaggtattttgcgaagcatccccgaatgggctacctgccagtgcagactgtcttagagggggacaacatggaaacgcctgcctcgtcccctcagctttcacacgatgatactcattcacgcattgaacattatgctagcaggctagcagaaatggaaaacagcaatggatcttatctaaatgatagcatctctcctaatgagagcatagatgatgaacatttgttaatccagcattactgccaaagtttgaaccaggactcccccctgagccagcctcgtagtcctgcccagatcttgatttccttagagagtgaggaaagaggggagctagagagaatcctagcagatcttgaggaagaaaacaggaatctgcaagcagaatatgaccgtctaaagcagcagcacgaacataaaggcctgtccccactgccgtcccctcctgaaatgatgcccacctctccccagagtccccgggatgctgagctcattgctgaggccaagctactgcgtcaacacaaaggccgcctggaagccaggatgcaaatcctggaagaccacaataaacagctggagtcacagttacacaggctaaggcagctgctggagcaaccccaggcagaggccaaagtgaatggcacaacggtgtcctctccttctacctctctacagaggtccgacagcagtcagcctatgctgctccgagtggttggcagtcaaacttcggactccatgggtgaggaagatcttctcagtcctccccaggacacaagcacagggttagaggaggtgatggagcaactcaacaactccttccctagttcaagaggacacaatgtaggaagtcttttccacatggcagatgatttgggcagagcgatggagtccttagtatcagtcatgacagatgaagaaggagcagaataaatgttttacaactcctgattcccgcatggtttttataatattcatacaacaaagaggattagacagtaagagtttacaagaaataaatctatatttttgtgaagggtagtggtattatactgtagatttcagtagtttctaagtctgttattgttttgttaacaatggcaggttttacacgtctatgcaattgtacaaaaaagttataagaaaactacatgtaaaatcttgatagctaaataacttgccatttctttatatggaacgcattttgggttgtttaaaaatttataacagttataaagaaagattgtaaactaaagtgtgctttataaaaaaaagttgtttataaaaacccctaaaaacaaaacaaacacacacacacacacatacacacacacacacaaaactttgaggcagcgcattgttttgcatccttttggcgtgatatccatatgaaattcatggctttttctttttttgcatattaaagataagacttcctctaccaccacaccaaatgactactacacactgctcatttgagaactgtcagctgagtggggcaggcttgagttttcatttcatatatctatatgtctataagtatataaatactatagttatatagataaagagatacgaatttctatagactgactttttccattttttaaatgttcatgtcacatcctaatagaaagaaattacttctagtcagtcatccaggcttacctgcttggtctagaatggatttttcccggagccggaagccaggaggaaactacaccacactaaaacattgtctacagctccagatgtttctcattttaaacaactttccactgacaacgaaagtaaagtaaagtattggatttttttaaagggaacatgtgaatgaatacacaggacttattatatcagagtgagtaatcggttggttggttgattgattgattgattgatacattcagcttcctgctgctagcaatgccacgatttagatttaatgatgcttcagtggaaatcaatcagaaggtattctgaccttgtgaacatcagaaggtattttttaactcccaagcagtagcaggacgatgatagggctggagggctatggattcccagcccatccctgtgaaggagtaggccactctttaagtgaaggattggatgattgttcataatacataaagttctctgtaattacaactaaattattatgccctcttctcacagtcaaaaggaactgggtggtttggtttttgttgcttttttagatttattgtcccatgtgggatgagtttttaaatgccacaagacataatttaaaataaataaactttgggaaaaggtgtaaaacagtagccccatcacatttgtgatactgacaggtatcaacccagaagcccatgaactgtgtttccatcctttgcatttctctgcgagtagttccacacaggtttgtaagtaagtaagaaagaaggcaaattgattcaaatgttacaaaaaaacccttcttggtggattagacaggttaaatatataaacaaacaaacaaaaattgctcaaaaaagaggagaaaagctcaagaggaaaagctaaggactggtaggaaaaagctttactctttcatgccattttatttctttttgatttttaaatcattcattcaatagataccaccgtgtgacctataattttgcaaatctgttacctctgacatcaagtgtaattagcttttggagagtgggctgacatcaagtgtaattagcttttggagagtgggttttgtccattattaataattaattaattaacatcaaacacggcttctcatgctatttctacctcactttggttttggggtgttcctgataattgtgcacacctgagttcacagcttcaccacttgtccattgcgttattttctttttcctttataattctttctttttccttcataattttcaaaagaaaacccaaagctctaaggtaacaaattaccaaattacatgaagatttggtttttgtcttgcatttttttcctttatgtgacgctggaccttttctttacccaaggatttttaaaactcagatttaaaacaaggggttactttacatcctactaagaagtttaagtaagtaagtttcattctaaaatcagaggtaaatagagtgcataaataattttgttttaatctttttgtttttcttttagacacattagctctggagtgagtctgtcataatatttgaacaaaaattgagagctttattgctgcattttaagcataattaatttggacattatttcgtgttgtgttctttataaccaccaagtattaaactgtaaatcataatgtaactgaagcataaacatcacatggcatgttttgtcattgttttcaggtactgagttcttacttgagtatcataatatattgtgttttaacaccaacactgtaacatttacgaattatttttttaaacttcagttttactgcattttcacaacatatcagacttcaccaaatatatgccttactattgtattatagtactgctttactgtgtatctcaataaagcacgcagttatgttac

SEQ ID NO: 431 - protein, 3690 aa, Homo sapiens
MLWWEEVEDCYEREDVQKKTFTKWVNAQFSKFGKQHIENLFSDLQDGRRLLDLLEGLTGQKLPKEKGSTRVHALNNVNKALRVLQNNNVDLVNIGSTDIVDGNHKLTLGLIWNIILHWQVKNVMKNIMAGLQQTNSEKILLSWVRQSTRNYPQVNVINFTTSWSDGLALNALIHSHRPDLFDWNSVVCQQSATQRLEHAFNIARYQLGIEKLLDPEDVDTTYPDKKSILMYITSLFQVLPQQVSIEAIQEVEMLPRPPKVTKEEHFQLHHQMHYSQQITVSLAQGYERTSSPKPRFKSYAYTQAAYVTTSDPTRSPFPSQHLEAPEDKSFGSSLMESEVNLDRYQTALEEVLSWLLSAEDTLQAQGEISNDVEVVKDQFHTHEGYMMDLTAHQGRVGNILQLGSKLIGTGKLSEDEETEVQEQMNLLNSRWECLRVASMEKQSNLHRVLMDLQNQKLKELNDWLTKTEERTRKMEEEPLGPDLEDLKRQVQQHKVLQEDLEQEQVRVNSLTHMVVVVDESSGDHATAALEEQLKVLGDRWANICRWTEDRWVLLQDILLKWQRLTEEQCLFSAWLSEKEDAVNKIHTTGFKDQNEMLSSLQKLAVLKADLEKKKQSMGKLYSLKQDLLSTLKNKSVTQKTEAWLDNFARCWDNLVQKLEKSTAQISQAVTTTQPSLTQTTVMETVTTVTTREQILVKHAQEELPPPPPQKKRQITVDSEIRKRLDVDITELHSWITRSEAVLQSPEFAIFRKEGNFSDLKEKVNAIEREKAEKFRKLQDASRSAQALVEQMVNEGVNADSIKQASEQLNSRWIEFCQLLSERLNWLEYQNNIIAFYNQLQQLEQMTTTAENWLKIQPTTPSEPTAIKSQLKICKDEVNRLSDLQPQIERLKIQSIALKEKGQGPMFLDADFVAFTNHFKQVFSDVQAREKELQTIFDTLPPMRYQETMSAIRTWVQQSETKLSIPQLSVTDYEIMEQRLGELQALQSSLQEQQSGLYYLSTTVKEMSKKAPSEISRKYQSEFEEIEGRWKKLSSQLVEHCQKLEEQMNKLRKIQNHIQTLKKWMAEVDVFLKEEWPALGDSEILKKQLKQCRLLVSDIQTIQPSLNSVNEGGQKIKNEAEPEFASRLETELKELNTQWDHMCQQVYARKEALKGGLEKTVSLQKDLSEMHEWMTQAEEEYLERDFEYKTPDELQKAVEEMKRAKEEAQQKEAKVKLLTESVNSVIAQAPPVAQEALKKELETLTTNYQWLCTRLNGKCKTLEEVWACWHELLSYLEKANKWLNEVEFKLKTTENIPGGAEEISEVLDSLENLMRHSEDNPNQIRILAQTLTDGGVMDELINEELETFNSRWRELHEEAVRRQKLLEQSIQSAQETEKSLHLIQESLTFIDKQLAAYIADKVDAAQMPQEAQKIQSDLTSHEISLEEMKKHNQGKEAAQRVLSQIDVAQKKLQDVSMKFRLFQKPANFEQRLQESKMILDEVKMHLPALETKSVEQEVVQSQLNHCVNLYKSLSEVKSEVEMVIKTGRQIVQKKQTENPKELDERVTALKLHYNELGAKVTERKQQLEKCLKLSRKMRKEMNVLTEWLAATDMELTKRSAVEGMPSNLDSEVAWGKATQKEIEKQKVHLKSITEVGEALKTVLGKKETLVEDKLSLLNSNWIAVTSRAEEWLNLLLEYQKHMETFDQNVDHITKWIIQADTLLDESEKKKPQQKEDVLKRLKAELNDIRPKVDSTRDQAANLMANRGDHCRKLVEPQISELNHRFAAISHRIKTGKASIPLKELEQFNSDIQKLLEPLEAEIQQGVNLKEEDFNKDMNEDNEGTVKELLQRGDNLQQRITDERKREEIKIKQQLLQTKHNALKDLRSQRRKKALEISHQWYQYKRQADDLLKCLDDIEKKLASLPEPRDERKIKEIDRELQKKKEELNAVRRQAEGLSEDGAAMAVEPTQIQLSKRWREIESKFAQFRRLNFAQIHTVREETMMVMTEDMPLEISYVPSTYLTEITHVSQALLEVEQLLNAPDLCAKDFEDLFKQEESLKNIKDSLQQSSGRIDIIHSKKTAALQSATPVERVKLQEALSQLDFQWEKVNKMYKDRQGRFDRSVEKWRRFHYDIKIFNQWLTEAEQFLRKTQIPENWEHAKYKWYLKELQDGIGQRQTVVRTLNATGEEIIQQSSKTDASILQEKLGSLNLRWQEVCKQLSDRKKRLEEQKNILSEFQRDLNEFVLWLEEADNIASIPLEPGKEQQLKEKLEQVKLLVEELPLRQGILKQLNETGGPVLVSAPISPEEQDKLENKLKQTNLQWIKVSRALPEKQGEIEAQIKDLGQLEKKLEDLEEQLNHLLLWLSPIRNQLEIYNQPNQEGPFDVKETEIAVQAKQPDVEEILSKGQHLYKEKPATQPVKRKLEDLSSEWKAVNRLLQELRAKQPDLAPGLTTIGASPTQTVTLVTQPVVTKETAISKLEMPSSLMLEVPALADFNRAWTELTDWLSLLDQVIKSQRVMVGDLEDINEMIIKQKATMQDLEQRRPQLEELITAAQNLKNKTSNQEARTIITDRIERIQNQWDEVQEHLQNRRQQLNEMLKDSTQWLEAKEEAEQVLGQARAKLESWKEGPYTVDAIQKKITETKQLAKDLRQWQTNVDVANDLALKLLRDYSADDTRKVHMITENINASWRSIHKRVSEREAALEETHRLLQQFPLDLEKFLAWLTEAETTANVLQDATRKERLLEDSKGVKELMKQWQDLQGEIEAHTDVYHNLDENSQKILRSLEGSDDAVLLQRRLDNMNFKWSELRKKSLNIRSHLEASSDQWKRLHLSLQELLVWLQLKDDELSRQAPIGGDFPAVQKQNDVHRAFKRELKTKEPVIMSTLETVRIFLTEQPLEGLEKLYQEPRELPPEERAQNVTRLLRKQAEEVNTEWEKLNLHSADWQRKIDETLERLRELQEATDELDLKLRQAEVIKGSWQPVGDLLIDSLQDHLEKVKALRGEIAPLKENVSHVNDLARQLTTLGIQLSPYNLSTLEDLNTRWKLLQVAVEDRVRQLHEAHRDFGPASQHFLSTSVQGPWERAISPNKVPYYINHETQTTCWDHPKMTELYQSLADLNNVRFSAYRTAMKLRRLQKALCLDLLSLSAACDALDQHNLKQNDQPMDILQIINCLTTIYDRLEQEHNNLVNVPLCVDMCLNWLLNVYDTGRTGRIRVLSFKTGIISLCKAHLEDKYRYLFKQVASSTGFCDQRRLGLLLHDSIQIPRQLGEVASFGGSNIEPSVRSCFQFANNKPEIEAALFLDWMRLEPQSMVWLPVLHRVAAAETAKHQAKCNICKECPIIGFRYRSLKHFNYDICQSCFFSGRVAKGHKMHYPMVEYCTPTTSGEDVRDFAKVLKNKFRTKRYFAKHPRMGYLPVQTVLEGDNMETPASSPQLSHDDTHSRIEHYASRLAEMENSNGSYLNDSISPNESIDDEHLLIQHYCQSLNQDSPLSQPRSPAQILISLESEERGELERILADLEEENRNLQAEYDRLKQQHEHKGLSPLPSPPEMMPTSPQSPRDAELIAEAKLLRQHKGRLEARMQILEDHNKQLESQLHRLRQLLEQPQAEAKVNGTTVSSPSTSLQRSDSSQPMLLRVVGSQTSDSMGEEDLLSPPQDTSTGLEEVMEQLNNSFPSSRGHNVGSLFHMADDLGRAMESLVSVMTDEEGAE

SEQ ID NO: 432 - DNA, 13055 bp, Homo sapiens
actttccccctacaggactcagatctgggaggcaattaccttcggagaaaaacgaataggaaaaactgaagtgttactttttttaaagctgctgaagtttgttggtttctcattgtttttaagcctactggagcaataaagtttgaagaacttttaccaggttttttttatcgctgccttgatatacacttttcaaaatgctttggtgggaagaagtagaggactgttatgaaagagaagatgttcaaaagaaaacattcacaaaatgggtaaatgcacaattttctaagtttgggaagcagcatattgagaacctcttcagtgacctacaggatgggaggcgcctcctagacctcctcgaaggcctgacagggcaaaaactgccaaaagaaaaaggatccacaagagttcatgccctgaacaatgtcaacaaggcactgcgggttttgcagaacaataatgttgatttagtgaatattggaagtactgacatcgtagatggaaatcataaactgactcttggtttgatttggaatataatcctccactggcaggtcaaaaatgtaatgaaaaatatcatggctggattgcaacaaaccaacagtgaaaagattctcctgagctgggtccgacaatcaactcgtaattatccacaggttaatgtaatcaacttcaccaccagctggtctgatggcctggctttgaatgctctcatccatagtcataggccagacctatttgactggaatagtgtggtttgccagcagtcagccacacaacgactggaacatgcattcaacatcgccagatatcaattaggcatagagaaactactcgatcctgaagatgttgataccacctatccagataagaagtccatcttaatgtacatcacatcactcttccaagttttgcctcaacaagtgagcattgaagccatccaggaagtggaaatgttgccaaggccacctaaagtgactaaagaagaacattttcagttacatcatcaaatgcactattctcaacagatcacggtcagtctagcacagggatatgagagaacttcttcccctaagcctcgattcaagagctatgcctacacacaggctgcttatgtcaccacctctgaccctacacggagcccatttccttcacagcatttggaagctcctgaagacaagtcatttggcagttcattgatggagagtgaagtaaacctggaccgttatcaaacagctttagaagaagtattatcgtggcttctttctgctgaggacacattgcaagcacaaggagagatttctaatgatgtggaagtggtgaaagaccagtttcatactcatgaggggtacatgatggatttgacagcccatcagggccgggttggtaatattctacaattgggaagtaagctgattggaacaggaaaattatcagaagatgaagaaactgaagtacaagagcagatgaatctcctaaattcaagatgggaatgcctcagggtagctagcatggaaaaacaaagcaatttacatagagttttaatggatctccagaatcagaaactgaaagagttgaatgactggctaacaaaaacagaagaaagaacaaggaaaatggaggaagagcctcttggacctgatcttgaagacctaaaacgccaagtacaacaacataaggtgcttcaagaagatctagaacaagaacaagtcagggtcaattctctcactcacatggtggtggtagttgatgaatctagtggagatcacgcaactgctgctttggaagaacaacttaaggtattgggagatcgatgggcaaacatctgtagatggacagaagaccgctgggttcttttacaagacatccttctcaaatggcaacgtcttactgaagaacagtgcctttttagtgcatggctttcagaaaaagaagatgcagtgaacaagattcacacaactggctttaaagatcaaaatgaaatgttatcaagtcttcaaaaactggccgttttaaaagcggatctagaaaagaaaaagcaatccatgggcaaactgtattcactcaaacaagatcttctttcaacactgaagaataagtcagtgacccagaagacggaagcatggctggataactttgcccggtgttgggataatttagtccaaaaacttgaaaagagtacagcacagatttcacaggctgtcaccaccactcagccatcactaacacagacaactgtaatggaaacagtaactacggtgaccacaagggaacagatcctggtaaagcatgctcaagaggaacttccaccaccacctccccaaaagaagaggcagattactgtggattctgaaattaggaaaaggttggatgttgatataactgaacttcacagctggattactcgctcagaagctgtgttgcagagtcctgaatttgcaatctttcggaaggaaggcaacttctcagacttaaaagaaaaagtcaatgccatagagcgagaaaaagctgagaagttcagaaaactgcaagatgccagcagatcagctcaggccctggtggaacagatggtgaatgagggtgttaatgcagatagcatcaaacaagcctcagaacaactgaacagccggtggatcgaattctgccagttgctaagtgagagacttaactggctggagtatcagaacaacatcatcgctttctataatcagctacaacaattggagcagatgacaactactgctgaaaactggttgaaaatccaacccaccaccccatcagagccaacagcaattaaaagtcagttaaaaatttgtaaggatgaagtcaaccggctatcagatcttcaacctcaaattgaacgattaaaaattcaaagcatagccctgaaagagaaaggacaaggacccatgttcctggatgcagactttgtggcctttacaaatcattttaagcaagtcttttctgatgtgcaggccagagagaaagagctacagacaatttttgacactttgccaccaatgcgctatcaggagaccatgagtgccatcaggacatgggtccagcagtcagaaaccaaactctccatacctcaacttagtgtcaccgactatgaaatcatggagcagagactcggggaattgcaggctttacaaagttctctgcaagagcaacaaagtggcctatactatctcagcaccactgtgaaagagatgtcgaagaaagcgccctctgaaattagccggaaatatcaatcagaatttgaagaaattgagggacgctggaagaagctctcctcccagctggttgagcattgtcaaaagctagaggagcaaatgaataaactccgaaaaattcagaatcacatacaaaccctgaagaaatggatggctgaagttgatgtttttctgaaggaggaatggcctgcccttggggattcagaaattctaaaaaagcagctgaaacagtgcagacttttagtcagtgatattcagacaattcagcccagtctaaacagtgtcaatgaaggtgggcagaagataaagaatgaagcagagccagagtttgcttcgagacttgagacagaactcaaagaacttaacactcagtgggatcacatgtgccaacaggtctatgccagaaaggaggccttgaagggaggtttggagaaaactgtaagcctccagaaagatctatcagagatgcacgaatggatgacacaagctgaagaagagtatcttgagagagattttgaatataaaactccagatgaattacagaaagcagttgaagagatgaagagagctaaagaagaggcccaacaaaaagaagcgaaagtgaaactccttactgagtctgtaaatagtgtcatagctcaagctccacctgtagcacaagaggccttaaaaaaggaacttgaaactctaaccaccaactaccagtggctctgcactaggctgaatgggaaatgcaagactttggaagaagtttgggcatgttggcatgagttattgtcatacttggagaaagcaaacaagtggctaaatgaagtagaatttaaacttaaaaccactgaaaacattcctggcggagctgaggaaatctctgaggtgctagattcacttgaaaatttgatgcgacattcagaggataacccaaatcagattcgcatattggcacagaccctaacagatggcggagtcatggatgagctaatcaatgaggaacttgagacatttaattctcgttggagggaactacatgaagaggctgtaaggaggcaaaagttgcttgaacagagcatccagtctgcccaggagactgaaaaatccttacacttaatccaggagtccctcacattcattgacaagcagttggcagcttatattgcagacaaggtggacgcagctcaaatgcctcaggaagcccagaaaatccaatctgatttgacaagtcatgagatcagtttagaagaaatgaagaaacataatcaggggaaggaggctgcccaaagagtcctgtctcagattgatgttgcacagaaaaaattacaagatgtctccatgaagtttcgattattccagaaaccagccaattttgagcagcgtctacaagaaagtaagatgattttagatgaagtgaagatgcacttgcctgcattggaaacaaagagtgtggaacaggaagtagtacagtcacagctaaatcattgtgtgaacttgtataaaagtctgagtgaagtgaagtctgaagtggaaatggtgataaagactggacgtcagattgtacagaaaaagcagacggaaaatcccaaagaacttgatgaaagagtaacagctttgaaattgcattataatgagctgggagcaaaggtaacagaaagaaagcaacagttggagaaatgcttgaaattgtcccgtaagatgcgaaaggaaatgaatgtcttgacagaatggctggcagctacagatatggaattgacaaagagatcagcagttgaaggaatgcctagtaatttggattctgaagttgcctggggaaaggctactcaaaaagagattgagaaacagaaggtgcacctgaagagtatcacagaggtaggagaggccttgaaaacagttttgggcaagaaggagacgttggtggaagataaactcagtcttctgaatagtaactggatagctgtcacctcccgagcagaagagtggttaaatcttttgttggaataccagaaacacatggaaacttttgaccagaatgtggaccacatcacaaagtggatcattcaggctgacacacttttggatgaatcagagaaaaagaaaccccagcaaaaagaagacgtgcttaagcgtttaaaggcagaactgaatgacatacgcccaaaggtggactctacacgtgaccaagcagcaaacttgatggcaaaccgcggtgaccactgcaggaaattagtagagccccaaatctcagagctcaaccatcgatttgcagccatttcacacagaattaagactggaaaggcctccattcctttgaaggaattggagcagtttaactcagatatacaaaaattgcttgaaccactggaggctgaaattcagcagggggtgaatctgaaagaggaagacttcaataaagatatgaatgaagacaatgagggtactgtaaaagaattgttgcaaagaggagacaacttacaacaaagaatcacagatgagagaaagcgagaggaaataaagataaaacagcagctgttacagacaaaacataatgctctcaaggatttgaggtctcaaagaagaaaaaaggctctagaaatttctcatcagtggtatcagtacaagaggcaggctgatgatctcctgaaatgcttggatgacattgaaaaaaaattagccagcctacctgagcccagagatgaaaggaaaataaaggaaattgatcgggaattgcagaagaagaaagaggagctgaatgcagtgcgtaggcaagctgagggcttgtctgaggatggggccgcaatggcagtggagccaactcagatccagctcagcaagcgctggcgggaaattgagagcaaatttgctcagtttcgaagactcaactttgcacaaattcacactgtccgtgaagaaacgatgatggtgatgactgaagacatgcctttggaaatttcttatgtgccttctacttatttgactgaaatcactcatgtctcacaagccctattagaagtggaacaacttctcaatgctcctgacctctgtgctaaggactttgaagatctctttaagcaagaggagtctctgaagaatataaaagatagtctacaacaaagctcaggtcggattgacattattcatagcaagaagacagcagcattgcaaagtgcaacgcctgtggaaagggtgaagctacaggaagctctctcccagcttgatttccaatgggaaaaagttaacaaaatgtacaaggaccgacaagggcgatttgacagatctgttgagaaatggcggcgttttcattatgatataaagatatttaatcagtggctaacagaagctgaacagtttctcagaaagacacaaattcctgagaattgggaacatgctaaatacaaatggtatcttaaggaactccaggatggcattgggcagcggcaaactgttgtcagaacattgaatgcaactggggaagaaataattcagcaatcctcaaaaacagatgccagtattctacaggaaaaattgggaagcctgaatctgcggtggcaggaggtctgcaaacagctgtcagacagaaaaaagaggctagaagaacaaaagaatatcttgtcagaatttcaaagagatttaaatgaatttgttttatggttggaggaagcagataacattgctagtatcccacttgaacctggaaaagagcagcaactaaaagaaaagcttgagcaagtcaagttactggtggaagagttgcccctgcgccagggaattctcaaacaattaaatgaaactggaggacccgtgcttgtaagtgctcccataagcccagaagagcaagataaacttgaaaataagctcaagcagacaaatctccagtggataaaggtttccagagctttacctgagaaacaaggagaaattgaagctcaaataaaagaccttgggcagcttgaaaaaaagcttgaagaccttgaagagcagttaaatcatctgctgctgtggttatctcctattaggaatcagttggaaatttataaccaaccaaaccaagaaggaccatttgacgttaaggaaactgaaatagcagttcaagctaaacaaccggatgtggaagagattttgtctaaagggcagcatttgtacaaggaaaaaccagccactcagccagtgaagaggaagttagaagatctgagctctgagtggaaggcggtaaaccgtttacttcaagagctgagggcaaagcagcctgacctagctcctggactgaccactattggagcctctcctactcagactgttactctggtgacacaacctgtggttactaaggaaactgccatctccaaactagaaatgccatcttccttgatgttggaggtacctgctctggcagatttcaaccgggcttggacagaacttaccgactggctttctctgcttgatcaagttataaaatcacagagggtgatggtgggtgaccttgaggatatcaacgagatgatcatcaagcagaaggcaacaatgcaggatttggaacagaggcgtccccagttggaagaactcattaccgctgcccaaaatttgaaaaacaagaccagcaatcaagaggctagaacaatcattacggatcgaattgaaagaattcagaatcagtgggatgaagtacaagaacaccttcagaaccggaggcaacagttgaatgaaatgttaaaggattcaacacaatggctggaagctaaggaagaagctgagcaggtcttaggacaggccagagccaagcttgagtcatggaaggagggtccctatacagtagatgcaatccaaaagaaaatcacagaaaccaagcagttggccaaagacctccgccagtggcagacaaatgtagatgtggcaaatgacttggccctgaaacttctccgggattattctgcagatgataccagaaaagtccacatgataacagagaatatcaatgcctcttggagaagcattcataaaagggtgagtgagcgagaggctgctttggaagaaactcatagattactgcaacagttccccctggacctggaaaagtttcttgcctggcttacagaagctgaaacaactgccaatgtcctacaggatgctacccgtaaggaaaggctcctagaagactccaagggagtaaaagagctgatgaaacaatggcaagacctccaaggtgaaattgaagctcacacagatgtttatcacaacctggatgaaaacagccaaaaaatcctgagatccctggaaggttccgatgatgcagtcctgttacaaagacgtttggataacatgaacttcaagtggagtgaacttcggaaaaagtctctcaacattaggtcccatttggaagccagttctgaccagtggaagcgtctgcacctttctctgcaggaacttctggtgtggctacagctgaaagatgatgaattaagccggcaggcacctattggaggcgactttccagcagttcagaagcagaacgatgtacatagggccttcaagagggaattgaaaactaaagaacctgtaatcatgagtactcttgagactgtacgaatatttctgacagagcagcctttggaaggactagagaaactctaccaggagcccagagagctgcctcctgaggagagagcccagaatgtcactcggcttctacgaaagcaggctgaggaggtcaatactgagtgggaaaaattgaacctgcactccgctgactggcagagaaaaatagatgagacccttgaaagactccgggaacttcaagaggccacggatgagctggacctcaagctgcgccaagctgaggtgatcaagggatcctggcagcccgtgggcgatctcctcattgactctctccaagatcacctcgagaaagtcaaggcacttcgaggagaaattgcgcctctgaaagagaacgtgagccacgtcaatgaccttgctcgccagcttaccactttgggcattcagctctcaccgtataacctcagcactctggaagacctgaacaccagatggaagcttctgcaggtggccgtcgaggaccgagtcaggcagctgcatgaagcccacagggactttggtccagcatctcagcactttctttccacgtctgtccagggtccctgggagagagccatctcgccaaacaaagtgccctactatatcaaccacgagactcaaacaacttgctgggaccatcccaaaatgacagagctctaccagtctttagctgacctgaataatgtcagattctcagcttataggactgccatgaaactccgaagactgcagaaggccctttgcttggatctcttgagcctgtcagctgcatgtgatgccttggaccagcacaacctcaagcaaaatgaccagcccatggatatcctgcagattattaattgtttgaccactatttatgaccgcctggagcaagagcacaacaatttggtcaacgtccctctctgcgtggatatgtgtctgaactggctgctgaatgtttatgatacgggacgaacagggaggatccgtgtcctgtcttttaaaactggcatcatttccctgtgtaaagcacatttggaagacaagtacagataccttttcaagcaagtggcaagttcaacaggattttgtgaccagcgcaggctgggcctccttctgcatgattctatccaaattccaagacagttgggtgaagttgcatcctttgggggcagtaacattgagccaagtgtccggagctgcttccaatttgctaataataagccagagatcgaagcggccctcttcctagactggatgagactggaaccccagtccatggtgtggctgcccgtcctgcacagagtggctgctgcagaaactgccaagcatcaggccaaatgtaacatctgcaaagagtgtccaatcattggattcaggtacaggagtctaaagcactttaattatgacatctgccaaagctgctttttttctggtcgagttgcaaaaggccataaaatgcactatcccatggtggaatattgcactccgactacatcaggagaagatgttcgagactttgccaaggtactaaaaaacaaatttcgaaccaaaaggtattttgcgaagcatccccgaatgggctacctgccagtgcagactgtcttagagggggacaacatggaaacgaatctgcaagcagaatatgaccgtctaaagcagcagcacgaacataaaggcctgtccccactgccgtcccctcctgaaatgatgcccacctctccccagagtccccgggatgctgagctcattgctgaggccaagctactgcgtcaacacaaaggccgcctggaagccaggatgcaaatcctggaagaccacaataaacagctggagtcacagttacacaggctaaggcagctgctggagcaaccccaggcagaggccaaagtgaatggcacaacggtgtcctctccttctacctctctacagaggtccgacagcagtcagcctatgctgctccgagtggttggcagtcaaacttcggactccatgggtgaggaagatcttctcagtcctccccaggacacaagcacagggttagaggaggtgatggagcaactcaacaactccttccctagttcaagaggacacaatgtaggaagtcttttccacatggcagatgatttgggcagagcgatggagtccttagtatcagtcatgacagatgaagaaggagcagaataaatgttttacaactcctgattcccgcatggtttttataatattcatacaacaaagaggattagacagtaagagtttacaagaaataaatctatatttttgtgaagggtagtggtattatactgtagatttcagtagtttctaagtctgttattgttttgttaacaatggcaggttttacacgtctatgcaattgtacaaaaaagttataagaaaactacatgtaaaatcttgatagctaaataacttgccatttctttatatggaacgcattttgggttgtttaaaaatttataacagttataaagaaagattgtaaactaaagtgtgctttataaaaaaaagttgtttataaaaacccctaaaaacaaaacaaacacacacacacacacatacacacacacacacaaaactttgaggcagcgcattgttttgcatccttttggcgtgatatccatatgaaattcatggctttttctttttttgcatattaaagataagacttcctctaccaccacaccaaatgactactacacactgctcatttgagaactgtcagctgagtggggcaggcttgagttttcatttcatatatctatatgtctataagtatataaatactatagttatatagataaagagatacgaatttctatagactgactttttccattttttaaatgttcatgtcacatcctaatagaaagaaattacttctagtcagtcatccaggcttacctgcttggtctagaatggatttttcccggagccggaagccaggaggaaactacaccacactaaaacattgtctacagctccagatgtttctcattttaaacaactttccactgacaacgaaagtaaagtaaagtattggatttttttaaagggaacatgtgaatgaatacacaggacttattatatcagagtgagtaatcggttggttggttgattgattgattgattgatacattcagcttcctgctgctagcaatgccacgatttagatttaatgatgcttcagtggaaatcaatcagaaggtattctgaccttgtgaacatcagaaggtattttttaactcccaagcagtagcaggacgatgatagggctggagggctatggattcccagcccatccctgtgaaggagtaggccactctttaagtgaaggattggatgattgttcataatacataaagttctctgtaattacaactaaattattatgccctcttctcacagtcaaaaggaactgggtggtttggtttttgttgcttttttagatttattgtcccatgtgggatgagtttttaaatgccacaagacataatttaaaataaataaactttgggaaaaggtgtaaaacagtagccccatcacatttgtgatactgacaggtatcaacccagaagcccatgaactgtgtttccatcctttgcatttctctgcgagtagttccacacaggtttgtaagtaagtaagaaagaaggcaaattgattcaaatgttacaaaaaaacccttcttggtggattagacaggttaaatatataaacaaacaaacaaaaattgctcaaaaaagaggagaaaagctcaagaggaaaagctaaggactggtaggaaaaagctttactctttcatgccattttatttctttttgatttttaaatcattcattcaatagataccaccgtgtgacctataattttgcaaatctgttacctctgacatcaagtgtaattagcttttggagagtgggctgacatcaagtgtaattagcttttggagagtgggttttgtccattattaataattaattaattaacatcaaacacggcttctcatgctatttctacctcactttggttttggggtgttcctgataattgtgcacacctgagttcacagcttcaccacttgtccattgcgttattttctttttcctttataattctttctttttccttcataattttcaaaagaaaacccaaagctctaaggtaacaaattaccaaattacatgaagatttggtttttgtcttgcatttttttcctttatgtgacgctggaccttttcttta

SEQ ID NO: 433 - protein, 3593 aa, Homo sapiens
MLWWEEVEDCYEREDVQKKTFTKWVNAQFSKFGKQHIENLFSDLQDGRRLLDLLEGLTGQKLPKEKGSTRVHALNNVNKALRVLQNNNVDLVNIGSTDIVDGNHKLTLGLIWNIILHWQVKNVMKNIMAGLQQTNSEKILLSWVRQSTRNYPQVNVINFTTSWSDGLALNALIHSHRPDLFDWNSVVCQQSATQRLEHAFNIARYQLGIEKLLDPEDVDTTYPDKKSILMYITSLFQVLPQQVSIEAIQEVEMLPRPPKVTKEEHFQLHHQMHYSQQITVSLAQGYERTSSPKPRFKSYAYTQAAYVTTSDPTRSPFPSQHLEAPEDKSFGSSLMESEVNLDRYQTALEEVLSWLLSAEDTLQAQGEISNDVEVVKDQFHTHEGYMMDLTAHQGRVGNILQLGSKLIGTGKLSEDEETEVQEQMNLLNSRWECLRVASMEKQSNLHRVLMDLQNQKLKELNDWLTKTEERTRKMEEEPLGPDLEDLKRQVQQHKVLQEDLEQEQVRVNSLTHMVVVVDESSGDHATAALEEQLKVLGDRWANICRWTEDRWVLLQDILLKWQRLTEEQCLFSAWLSEKEDAVNKIHTTGFKDQNEMLSSLQKLAVLKADLEKKKQSMGKLYSLKQDLLSTLKNKSVTQKTEAWLDNFARCWDNLVQKLEKSTAQISQAVTTTQPSLTQTTVMETVTTVTTREQILVKHAQEELPPPPPQKKRQITVDSEIRKRLDVDITELHSWITRSEAVLQSPEFAIFRKEGNFSDLKEKVNAIEREKAEKFRKLQDASRSAQALVEQMVNEGVNADSIKQASEQLNSRWIEFCQLLSERLNWLEYQNNIIAFYNQLQQLEQMTTTAENWLKIQPTTPSEPTAIKSQLKICKDEVNRLSDLQPQIERLKIQSIALKEKGQGPMFLDADFVAFTNHFKQVFSDVQAREKELQTIFDTLPPMRYQETMSAIRTWVQQSETKLSIPQLSVTDYEIMEQRLGELQALQSSLQEQQSGLYYLSTTVKEMSKKAPSEISRKYQSEFEEIEGRWKKLSSQLVEHCQKLEEQMNKLRKIQNHIQTLKKWMAEVDVFLKEEWPALGDSEILKKQLKQCRLLVSDIQTIQPSLNSVNEGGQKIKNEAEPEFASRLETELKELNTQWDHMCQQVYARKEALKGGLEKTVSLQKDLSEMHEWMTQAEEEYLERDFEYKTPDELQKAVEEMKRAKEEAQQKEAKVKLLTESVNSVIAQAPPVAQEALKKELETLTTNYQWLCTRLNGKCKTLEEVWACWHELLSYLEKANKWLNEVEFKLKTTENIPGGAEEISEVLDSLENLMRHSEDNPNQIRILAQTLTDGGVMDELINEELETFNSRWRELHEEAVRRQKLLEQSIQSAQETEKSLHLIQESLTFIDKQLAAYIADKVDAAQMPQEAQKIQSDLTSHEISLEEMKKHNQGKEAAQRVLSQIDVAQKKLQDVSMKFRLFQKPANFEQRLQESKMILDEVKMHLPALETKSVEQEVVQSQLNHCVNLYKSLSEVKSEVEMVIKTGRQIVQKKQTENPKELDERVTALKLHYNELGAKVTERKQQLEKCLKLSRKMRKEMNVLTEWLAATDMELTKRSAVEGMPSNLDSEVAWGKATQKEIEKQKVHLKSITEVGEALKTVLGKKETLVEDKLSLLNSNWIAVTSRAEEWLNLLLEYQKHMETFDQNVDHITKWIIQADTLLDESEKKKPQQKEDVLKRLKAELNDIRPKVDSTRDQAANLMANRGDHCRKLVEPQISELNHRFAAISHRIKTGKASIPLKELEQFNSDIQKLLEPLEAEIQQGVNLKEEDFNKDMNEDNEGTVKELLQRGDNLQQRITDERKREEIKIKQQLLQTKHNALKDLRSQRRKKALEISHQWYQYKRQADDLLKCLDDIEKKLASLPEPRDERKIKEIDRELQKKKEELNAVRRQAEGLSEDGAAMAVEPTQIQLSKRWREIESKFAQFRRLNFAQIHTVREETMMVMTEDMPLEISYVPSTYLTEITHVSQALLEVEQLLNAPDLCAKDFEDLFKQEESLKNIKDSLQQSSGRIDIIHSKKTAALQSATPVERVKLQEALSQLDFQWEKVNKMYKDRQGRFDRSVEKWRRFHYDIKIFNQWLTEAEQFLRKTQIPENWEHAKYKWYLKELQDGIGQRQTVVRTLNATGEEIIQQSSKTDASILQEKLGSLNLRWQEVCKQLSDRKKRLEEQKNILSEFQRDLNEFVLWLEEADNIASIPLEPGKEQQLKEKLEQVKLLVEELPLRQGILKQLNETGGPVLVSAPISPEEQDKLENKLKQTNLQWIKVSRALPEKQGEIEAQIKDLGQLEKKLEDLEEQLNHLLLWLSPIRNQLEIYNQPNQEGPFDVKETEIAVQAKQPDVEEILSKGQHLYKEKPATQPVKRKLEDLSSEWKAVNRLLQELRAKQPDLAPGLTTIGASPTQTVTLVTQPVVTKETAISKLEMPSSLMLEVPALADFNRAWTELTDWLSLLDQVIKSQRVMVGDLEDINEMIIKQKATMQDLEQRRPQLEELITAAQNLKNKTSNQEARTIITDRIERIQNQWDEVQEHLQNRRQQLNEMLKDSTQWLEAKEEAEQVLGQARAKLESWKEGPYTVDAIQKKITETKQLAKDLRQWQTNVDVANDLALKLLRDYSADDTRKVHMITENINASWRSIHKRVSEREAALEETHRLLQQFPLDLEKFLAWLTEAETTANVLQDATRKERLLEDSKGVKELMKQWQDLQGEIEAHTDVYHNLDENSQKILRSLEGSDDAVLLQRRLDNMNFKWSELRKKSLNIRSHLEASSDQWKRLHLSLQELLVWLQLKDDELSRQAPIGGDFPAVQKQNDVHRAFKRELKTKEPVIMSTLETVRIFLTEQPLEGLEKLYQEPRELPPEERAQNVTRLLRKQAEEVNTEWEKLNLHSADWQRKIDETLERLRELQEATDELDLKLRQAEVIKGSWQPVGDLLIDSLQDHLEKVKALRGEIAPLKENVSHVNDLARQLTTLGIQLSPYNLSTLEDLNTRWKLLQVAVEDRVRQLHEAHRDFGPASQHFLSTSVQGPWERAISPNKVPYYINHETQTTCWDHPKMTELYQSLADLNNVRFSAYRTAMKLRRLQKALCLDLLSLSAACDALDQHNLKQNDQPMDILQIINCLTTIYDRLEQEHNNLVNVPLCVDMCLNWLLNVYDTGRTGRIRVLSFKTGIISLCKAHLEDKYRYLFKQVASSTGFCDQRRLGLLLHDSIQIPRQLGEVASFGGSNIEPSVRSCFQFANNKPEIEAALFLDWMRLEPQSMVWLPVLHRVAAAETAKHQAKCNICKECPIIGFRYRSLKHFNYDICQSCFFSGRVAKGHKMHYPMVEYCTPTTSGEDVRDFAKVLKNKFRTKRYFAKHPRMGYLPVQTVLEGDNMETNLQAEYDRLKQQHEHKGLSPLPSPPEMMPTSPQSPRDAELIAEAKLLRQHKGRLEARMQILEDHNKQLESQLHRLRQLLEQPQAEAKVNGTTVSSPSTSLQRSDSSQPMLLRVVGSQTSDSMGEEDLLSPPQDTSTGLEEVMEQLNNSFPSSRGHNVGSLFHMADDLGRAMESLVSVMTDEEGAE

SEQ ID NO: 434 - DNA, 11474 bp, Homo sapiens
actttccccctacaggactcagatctgggaggcaattaccttcggagaaaaacgaataggaaaaactgaagtgttactttttttaaagctgctgaagtttgttggtttctcattgtttttaagcctactggagcaataaagtttgaagaacttttaccaggttttttttatcgctgccttgatatacacttttcaaaatgctttggtgggaagaagtagaggactgttatgaaagagaagatgttcaaaagaaaacattcacaaaatgggtaaatgcacaattttctaagtttgggaagcagcatattgagaacctcttcagtgacctacaggatgggaggcgcctcctagacctcctcgaaggcctgacagggcaaaaactgccaaaagaaaaaggatccacaagagttcatgccctgaacaatgtcaacaaggcactgcgggttttgcagaacaataatgttgatttagtgaatattggaagtactgacatcgtagatggaaatcataaactgactcttggtttgatttggaatataatcctccactggcaggtcaaaaatgtaatgaaaaatatcatggctggattgcaacaaaccaacagtgaaaagattctcctgagctgggtccgacaatcaactcgtaattatccacaggttaatgtaatcaacttcaccaccagctggtctgatggcctggctttgaatgctctcatccatagtcataggccagacctatttgactggaatagtgtggtttgccagcagtcagccacacaacgactggaacatgcattcaacatcgccagatatcaattaggcatagagaaactactcgatcctgaagatgttgataccacctatccagataagaagtccatcttaatgtacatcacatcactcttccaagttttgcctcaacaagtgagcattgaagccatccaggaagtggaaatgttgccaaggccacctaaagtgactaaagaagaacattttcagttacatcatcaaatgcactattctcaacagatcacggtcagtctagcacagggatatgagagaacttcttcccctaagcctcgattcaagagctatgcctacacacaggctgcttatgtcaccacctctgaccctacacggagcccatttccttcacagcatttggaagctcctgaagacaagtcatttggcagttcattgatggagagtgaagtaaacctggaccgttatcaaacagctttagaagaagtattatcgtggcttctttctgctgaggacacattgcaagcacaaggagagatttctaatgatgtggaagtggtgaaagaccagtttcatactcatgaggggtacatgatggatttgacagcccatcagggccgggttggtaatattctacaattgggaagtaagctgattggaacaggaaaattatcagaagatgaagaaactgaagtacaagagcagatgaatctcctaaattcaagatgggaatgcctcagggtagctagcatggaaaaacaaagcaatttacatagagttttaatggatctccagaatcagaaactgaaagagttgaatgactggctaacaaaaacagaagaaagaacaaggaaaatggaggaagagcctcttggacctgatcttgaagacctaaaacgccaagtacaacaacataaggtgcttcaagaagatctagaacaagaacaagtcagggtcaattctctcactcacatggtggtggtagttgatgaatctagtggagatcacgcaactgctgctttggaagaacaacttaaggtattgggagatcgatgggcaaacatctgtagatggacagaagaccgctgggttcttttacaagacatccttctcaaatggcaacgtcttactgaagaacagtgcctttttagtgcatggctttcagaaaaagaagatgcagtgaacaagattcacacaactggctttaaagatcaaaatgaaatgttatcaagtcttcaaaaactggccgttttaaaagcggatctagaaaagaaaaagcaatccatgggcaaactgtattcactcaaacaagatcttctttcaacactgaagaataagtcagtgacccagaagacggaagcatggctggataactttgcccggtgttgggataatttagtccaaaaacttgaaaagagtacagcacagatttcacaggctgtcaccaccactcagccatcactaacacagacaactgtaatggaaacagtaactacggtgaccacaagggaacagatcctggtaaagcatgctcaagaggaacttccaccaccacctccccaaaagaagaggcagattactgtggattctgaaattaggaaaaggttggatgttgatataactgaacttcacagctggattactcgctcagaagctgtgttgcagagtcctgaatttgcaatctttcggaaggaaggcaacttctcagacttaaaagaaaaagtcaatgccatagagcgagaaaaagctgagaagttcagaaaactgcaagatgccagcagatcagctcaggccctggtggaacagatggtgaatgagggtgttaatgcagatagcatcaaacaagcctcagaacaactgaacagccggtggatcgaattctgccagttgctaagtgagagacttaactggctggagtatcagaacaacatcatcgctttctataatcagctacaacaattggagcagatgacaactactgctgaaaactggttgaaaatccaacccaccaccccatcagagccaacagcaattaaaagtcagttaaaaatttgtaaggatgaagtcaaccggctatcagatcttcaacctcaaattgaacgattaaaaattcaaagcatagccctgaaagagaaaggacaaggacccatgttcctggatgcagactttgtggcctttacaaatcattttaagcaagtcttttctgatgtgcaggccagagagaaagagctacagacaatttttgacactttgccaccaatgcgctatcaggagaccatgagtgccatcaggacatgggtccagcagtcagaaaccaaactctccatacctcaacttagtgtcaccgactatgaaatcatggagcagagactcggggaattgcaggctttacaaagttctctgcaagagcaacaaagtggcctatactatctcagcaccactgtgaaagagatgtcgaagaaagcgccctctgaaattagccggaaatatcaatcagaatttgaagaaattgagggacgctggaagaagctctcctcccagctggttgagcattgtcaaaagctagaggagcaaatgaataaactccgaaaaattcagaatcacatacaaaccctgaagaaatggatggctgaagttgatgtttttctgaaggaggaatggcctgcccttggggattcagaaattctaaaaaagcagctgaaacagtgcagacttttagtcagtgatattcagacaattcagcccagtctaaacagtgtcaatgaaggtgggcagaagataaagaatgaagcagagccagagtttgcttcgagacttgagacagaactcaaagaacttaacactcagtgggatcacatgtgccaacaggtctatgccagaaaggaggccttgaagggaggtttggagaaaactgtaagcctccagaaagatctatcagagatgcacgaatggatgacacaagctgaagaagagtatcttgagagagattttgaatataaaactccagatgaattacagaaagcagttgaagagatgaagagagctaaagaagaggcccaacaaaaagaagcgaaagtgaaactccttactgagtctgtaaatagtgtcatagctcaagctccacctgtagcacaagaggccttaaaaaaggaacttgaaactctaaccaccaactaccagtggctctgcactaggctgaatgggaaatgcaagactttggaagaagtttgggcatgttggcatgagttattgtcatacttggagaaagcaaacaagtggctaaatgaagtagaatttaaacttaaaaccactgaaaacattcctggcggagctgaggaaatctctgaggtgctagattcacttgaaaatttgatgcgacattcagaggataacccaaatcagattcgcatattggcacagaccctaacagatggcggagtcatggatgagctaatcaatgaggaacttgagacatttaattctcgttggagggaactacatgaagaggctgtaaggaggcaaaagttgcttgaacagagcatccagtctgcccaggagactgaaaaatccttacacttaatccaggagtccctcacattcattgacaagcagttggcagcttatattgcagacaaggtggacgcagctcaaatgcctcaggaagcccagaaaatccaatctgatttgacaagtcatgagatcagtttagaagaaatgaagaaacataatcaggggaaggaggctgcccaaagagtcctgtctcagattgatgttgcacagaaaaaattacaagatgtctccatgaagtttcgattattccagaaaccagccaattttgagcagcgtctacaagaaagtaagatgattttagatgaagtgaagatgcacttgcctgcattggaaacaaagagtgtggaacaggaagtagtacagtcacagctaaatcattgtgtgaacttgtataaaagtctgagtgaagtgaagtctgaagtggaaatggtgataaagactggacgtcagattgtacagaaaaagcagacggaaaatcccaaagaacttgatgaaagagtaacagctttgaaattgcattataatgagctgggagcaaaggtaacagaaagaaagcaacagttggagaaatgcttgaaattgtcccgtaagatgcgaaaggaaatgaatgtcttgacagaatggctggcagctacagatatggaattgacaaagagatcagcagttgaaggaatgcctagtaatttggattctgaagttgcctggggaaaggctactcaaaaagagattgagaaacagaaggtgcacctgaagagtatcacagaggtaggagaggccttgaaaacagttttgggcaagaaggagacgttggtggaagataaactcagtcttctgaatagtaactggatagctgtcacctcccgagcagaagagtggttaaatcttttgttggaataccagaaacacatggaaacttttgaccagaatgtggaccacatcacaaagtggatcattcaggctgacacacttttggatgaatcagagaaaaagaaaccccagcaaaaagaagacgtgcttaagcgtttaaaggcagaactgaatgacatacgcccaaaggtggactctacacgtgaccaagcagcaaacttgatggcaaaccgcggtgaccactgcaggaaattagtagagccccaaatctcagagctcaaccatcgatttgcagccatttcacacagaattaagactggaaaggcctccattcctttgaaggaattggagcagtttaactcagatatacaaaaattgcttgaaccactggaggctgaaattcagcagggggtgaatctgaaagaggaagacttcaataaagatatgaatgaagacaatgagggtactgtaaaagaattgttgcaaagaggagacaacttacaacaaagaatcacagatgagagaaagcgagaggaaataaagataaaacagcagctgttacagacaaaacataatgctctcaaggatttgaggtctcaaagaagaaaaaaggctctagaaatttctcatcagtggtatcagtacaagaggcaggctgatgatctcctgaaatgcttggatgacattgaaaaaaaattagccagcctacctgagcccagagatgaaaggaaaataaaggaaattgatcgggaattgcagaagaagaaagaggagctgaatgcagtgcgtaggcaagctgagggcttgtctgaggatggggccgcaatggcagtggagccaactcagatccagctcagcaagcgctggcgggaaattgagagcaaatttgctcagtttcgaagactcaactttgcacaaattcacactgtccgtgaagaaacgatgatggtgatgactgaagacatgcctttggaaatttcttatgtgccttctacttatttgactgaaatcactcatgtctcacaagccctattagaagtggaacaacttctcaatgctcctgacctctgtgctaaggactttgaagatctctttaagcaagaggagtctctgaagaatataaaagatagtctacaacaaagctcaggtcggattgacattattcatagcaagaagacagcagcattgcaaagtgcaacgcctgtggaaagggtgaagctacaggaagctctctcccagcttgatttccaatgggaaaaagttaacaaaatgtacaaggaccgacaagggcgatttgacagatctgttgagaaatggcggcgttttcattatgatataaagatatttaatcagtggctaacagaagctgaacagtttctcagaaagacacaaattcctgagaattgggaacatgctaaatacaaatggtatcttaaggaactccaggatggcattgggcagcggcaaactgttgtcagaacattgaatgcaactggggaagaaataattcagcaatcctcaaaaacagatgccagtattctacaggaaaaattgggaagcctgaatctgcggtggcaggaggtctgcaaacagctgtcagacagaaaaaagaggctagaagaacaaaagaatatcttgtcagaatttcaaagagatttaaatgaatttgttttatggttggaggaagcagataacattgctagtatcccacttgaacctggaaaagagcagcaactaaaagaaaagcttgagcaagtcaagttactggtggaagagttgcccctgcgccagggaattctcaaacaattaaatgaaactggaggacccgtgcttgtaagtgctcccataagcccagaagagcaagataaacttgaaaataagctcaagcagacaaatctccagtggataaaggtttccagagctttacctgagaaacaaggagaaattgaagctcaaataaaagaccttgggcagcttgaaaaaaagcttgaagaccttgaagagcagttaaatcatctgctgctgtggttatctcctattaggaatcagttggaaatttataaccaaccaaaccaagaaggaccatttgacgttaaggaaactgaaatagcagttcaagctaaacaaccggatgtggaagagattttgtctaaagggcagcatttgtacaaggaaaaaccagccactcagccagtgaagaggaagttagaagatctgagctctgagtggaaggcggtaaaccgtttacttcaagagctgagggcaaagcagcctgacctagctcctggactgaccactattggagcctctcctactcagactgttactctggtgacacaacctgtggttactaaggaaactgccatctccaaactagaaatgccatcttccttgatgttggaggtacctgctctggcagatttcaaccgggcttggacagaacttaccgactggctttctctgcttgatcaagttataaaatcacagagggtgatggtgggtgaccttgaggatatcaacgagatgatcatcaagcagaaggcaacaatgcaggatttggaacagaggcgtccccagttggaagaactcattaccgctgcccaaaatttgaaaaacaagaccagcaatcaagaggctagaacaatcattacggatcgaattgaaagaattcagaatcagtgggatgaagtacaagaacaccttcagaaccggaggcaacagttgaatgaaatgttaaaggattcaacacaatggctggaagctaaggaagaagctgagcaggtcttaggacaggccagagccaagcttgagtcatggaaggagggtccctatacagtagatgcaatccaaaagaaaatcacagaaaccaagcagttggccaaagacctccgccagtggcagacaaatgtagatgtggcaaatgacttggccctgaaacttctccgggattattctgcagatgataccagaaaagtccacatgataacagagaatatcaatgcctcttggagaagcattcataaaagggtgagtgagcgagaggctgctttggaagaaactcatagattactgcaacagttccccctggacctggaaaagtttcttgcctggcttacagaagctgaaacaactgccaatgtcctacaggatgctacccgtaaggaaaggctcctagaagactccaagggagtaaaagagctgatgaaacaatggcaagacctccaaggtgaaattgaagctcacacagatgtttatcacaacctggatgaaaacagccaaaaaatcctgagatccctggaaggttccgatgatgcagtcctgttacaaagacgtttggataacatgaacttcaagtggagtgaacttcggaaaaagtctctcaacattaggtcccatttggaagccagttctgaccagtggaagcgtctgcacctttctctgcaggaacttctggtgtggctacagctgaaagatgatgaattaagccggcaggcacctattggaggcgactttccagcagttcagaagcagaacgatgtacatagggccttcaagagggaattgaaaactaaagaacctgtaatcatgagtactcttgagactgtacgaatatttctgacagagcagcctttggaaggactagagaaactctaccaggagcccagagagctgcctcctgaggagagagcccagaatgtcactcggcttctacgaaagcaggctgaggaggtcaatactgagtgggaaaaattgaacctgcactccgctgactggcagagaaaaatagatgagacccttgaaagactccgggaacttcaagaggccacggatgagctggacctcaagctgcgccaagctgaggtgatcaagggatcctggcagcccgtgggcgatctcctcattgactctctccaagatcacctcgagaaagtcaaggcacttcgaggagaaattgcgcctctgaaagagaacgtgagccacgtcaatgaccttgctcgccagcttaccactttgggcattcagctctcaccgtataacctcagcactctggaagacctgaacaccagatggaagcttctgcaggtggccgtcgaggaccgagtcaggcagctgcatgaagcccacagggactttggtccagcatctcagcactttctttccacgtctgtccagggtccctgggagagagccatctcgccaaacaaagtgccctactatatcaaccacgagactcaaacaacttgctgggaccatcccaaaatgacagagctctaccagtctttagctgacctgaataatgtcagattctcagcttataggactgccatgaaactccgaagactgcagaaggccctttgcttggatctcttgagcctgtcagctgcatgtgatgccttggaccagcacaacctcaagcaaaatgaccagcccatggatatcctgcagattattaattgtttgaccactatttatgaccgcctggagcaagagcacaacaatttggtcaacgtccctctctgcgtggatatgtgtctgaactggctgctgaatgtttatgatacgggacgaacagggaggatccgtgtcctgtcttttaaaactggcatcatttccctgtgtaaagcacatttggaagacaagtacagataccttttcaagcaagtggcaagttcaacaggattttgtgaccagcgcaggctgggcctccttctgcatgattctatccaaattccaagacagttgggtgaagttgcatcctttgggggcagtaacattgagccaagtgtccggagctgcttccaattttcccaatctctggaaaccacagctctgttttctgttcctgtaattttgccttttcctgaactggattttaaaggattgtaggaggcagtagtggaagagctaactttatatcttgttcttttacataatgcgccctgatccacacttgggaaagtatattccatggtacctatagacagatatatgtgctttaccatgtatatgtgaaacttttctaatttaactttcctgttaaattagaactcggtagcataaattaatactgttgagtatacttagggatttgcatagatttaaaattgtgcatatgttccctagggccatggcgttaattggtttattagtcaggtggagtgcagagcctgaggtcaggacagttgtccttgaacatggaaatgaagagtggataatcaccatgtgttattgtttgggctgattttatctttaatgggtgattcagagtcctgattaatatttagagcagtgactgctggcctcctacctgctcattatcttcagaactttaaataaaatacttgatttctacccaagatggtagttatgggaagccttttacttcttcttgtctcacaaagacaactcttgacctctcaatccttaaacaaaaagttctgcttctgcgcatgtggggactcttaaactcattttcatgcctggagattcacatttagggatctaggaaaagcacatctaggcagagtcgatgaggagatgctttaagaaccgtgacaaggacaggaaggaaatcaattttgcgttaggtttgtatttttagagaaaacgaatcctggggaacttttcacactcattactattgacattaataccattgtcctgtccctttcacagttactaaaatcactcttgcccaccctcctgccttgcccacaacctattcccatgaaggggtgacttgggagaaataacggtttccaaccaacgttttattttggaaacatttcaagcacaaagagtagttgaaaggatagtctaaagaacactcatctgtgtcatacatctgttcaatccatggttgcttttcgctctacttacctcctccaccctctcagctctgtttatgtatgtgtctgtctgtgtacatacacacacaaacacattttcccctatgccatttaaaagtaaaggagcatcacaacataaacccctaaacacttcaccatacaccattttcttaaaggatgacattctctaacataactgcaatgctatcgttacacacaaatttaacagcaatccagcaataccctctgatatgcagtccacactgaactttccccagtgccccagaattgttccttatagccactgttttcttccagcatctagtcaaggtttttgtctgtcatgtctctgtaccttcatttagttttgaacagtctcccagcattttgttttcctttcatgacattgacttttttggtaggggga

SEQ ID NO: 435 - protein, 3295 aa, Homo sapiens
MLWWEEVEDCYEREDVQKKTFTKWVNAQFSKFGKQHIENLFSDLQDGRRLLDLLEGLTGQKLPKEKGSTRVHALNNVNKALRVLQNNNVDLVNIGSTDIVDGNHKLTLGLIWNIILHWQVKNVMKNIMAGLQQTNSEKILLSWVRQSTRNYPQVNVINFTTSWSDGLALNALIHSHRPDLFDWNSVVCQQSATQRLEHAFNIARYQLGIEKLLDPEDVDTTYPDKKSILMYITSLFQVLPQQVSIEAIQEVEMLPRPPKVTKEEHFQLHHQMHYSQQITVSLAQGYERTSSPKPRFKSYAYTQAAYVTTSDPTRSPFPSQHLEAPEDKSFGSSLMESEVNLDRYQTALEEVLSWLLSAEDTLQAQGEISNDVEVVKDQFHTHEGYMMDLTAHQGRVGNILQLGSKLIGTGKLSEDEETEVQEQMNLLNSRWECLRVASMEKQSNLHRVLMDLQNQKLKELNDWLTKTEERTRKMEEEPLGPDLEDLKRQVQQHKVLQEDLEQEQVRVNSLTHMVVVVDESSGDHATAALEEQLKVLGDRWANICRWTEDRWVLLQDILLKWQRLTEEQCLFSAWLSEKEDAVNKIHTTGFKDQNEMLSSLQKLAVLKADLEKKKQSMGKLYSLKQDLLSTLKNKSVTQKTEAWLDNFARCWDNLVQKLEKSTAQISQAVTTTQPSLTQTTVMETVTTVTTREQILVKHAQEELPPPPPQKKRQITVDSEIRKRLDVDITELHSWITRSEAVLQSPEFAIFRKEGNFSDLKEKVNAIEREKAEKFRKLQDASRSAQALVEQMVNEGVNADSIKQASEQLNSRWIEFCQLLSERLNWLEYQNNIIAFYNQLQQLEQMTTTAENWLKIQPTTPSEPTAIKSQLKICKDEVNRLSDLQPQIERLKIQSIALKEKGQGPMFLDADFVAFTNHFKQVFSDVQAREKELQTIFDTLPPMRYQETMSAIRTWVQQSETKLSIPQLSVTDYEIMEQRLGELQALQSSLQEQQSGLYYLSTTVKEMSKKAPSEISRKYQSEFEEIEGRWKKLSSQLVEHCQKLEEQMNKLRKIQNHIQTLKKWMAEVDVFLKEEWPALGDSEILKKQLKQCRLLVSDIQTIQPSLNSVNEGGQKIKNEAEPEFASRLETELKELNTQWDHMCQQVYARKEALKGGLEKTVSLQKDLSEMHEWMTQAEEEYLERDFEYKTPDELQKAVEEMKRAKEEAQQKEAKVKLLTESVNSVIAQAPPVAQEALKKELETLTTNYQWLCTRLNGKCKTLEEVWACWHELLSYLEKANKWLNEVEFKLKTTENIPGGAEEISEVLDSLENLMRHSEDNPNQIRILAQTLTDGGVMDELINEELETFNSRWRELHEEAVRRQKLLEQSIQSAQETEKSLHLIQESLTFIDKQLAAYIADKVDAAQMPQEAQKIQSDLTSHEISLEEMKKHNQGKEAAQRVLSQIDVAQKKLQDVSMKFRLFQKPANFEQRLQESKMILDEVKMHLPALETKSVEQEVVQSQLNHCVNLYKSLSEVKSEVEMVIKTGRQIVQKKQTENPKELDERVTALKLHYNELGAKVTERKQQLEKCLKLSRKMRKEMNVLTEWLAATDMELTKRSAVEGMPSNLDSEVAWGKATQKEIEKQKVHLKSITEVGEALKTVLGKKETLVEDKLSLLNSNWIAVTSRAEEWLNLLLEYQKHMETFDQNVDHITKWIIQADTLLDESEKKKPQQKEDVLKRLKAELNDIRPKVDSTRDQAANLMANRGDHCRKLVEPQISELNHRFAAISHRIKTGKASIPLKELEQFNSDIQKLLEPLEAEIQQGVNLKEEDFNKDMNEDNEGTVKELLQRGDNLQQRITDERKREEIKIKQQLLQTKHNALKDLRSQRRKKALEISHQWYQYKRQADDLLKCLDDIEKKLASLPEPRDERKIKEIDRELQKKKEELNAVRRQAEGLSEDGAAMAVEPTQIQLSKRWREIESKFAQFRRLNFAQIHTVREETMMVMTEDMPLEISYVPSTYLTEITHVSQALLEVEQLLNAPDLCAKDFEDLFKQEESLKNIKDSLQQSSGRIDIIHSKKTAALQSATPVERVKLQEALSQLDFQWEKVNKMYKDRQGRFDRSVEKWRRFHYDIKIFNQWLTEAEQFLRKTQIPENWEHAKYKWYLKELQDGIGQRQTVVRTLNATGEEIIQQSSKTDASILQEKLGSLNLRWQEVCKQLSDRKKRLEEQKNILSEFQRDLNEFVLWLEEADNIASIPLEPGKEQQLKEKLEQVKLLVEELPLRQGILKQLNETGGPVLVSAPISPEEQDKLENKLKQTNLQWIKVSRALPEKQGEIEAQIKDLGQLEKKLEDLEEQLNHLLLWLSPIRNQLEIYNQPNQEGPFDVKETEIAVQAKQPDVEEILSKGQHLYKEKPATQPVKRKLEDLSSEWKAVNRLLQELRAKQPDLAPGLTTIGASPTQTVTLVTQPVVTKETAISKLEMPSSLMLEVPALADFNRAWTELTDWLSLLDQVIKSQRVMVGDLEDINEMIIKQKATMQDLEQRRPQLEELITAAQNLKNKTSNQEARTIITDRIERIQNQWDEVQEHLQNRRQQLNEMLKDSTQWLEAKEEAEQVLGQARAKLESWKEGPYTVDAIQKKITETKQLAKDLRQWQTNVDVANDLALKLLRDYSADDTRKVHMITENINASWRSIHKRVSEREAALEETHRLLQQFPLDLEKFLAWLTEAETTANVLQDATRKERLLEDSKGVKELMKQWQDLQGEIEAHTDVYHNLDENSQKILRSLEGSDDAVLLQRRLDNMNFKWSELRKKSLNIRSHLEASSDQWKRLHLSLQELLVWLQLKDDELSRQAPIGGDFPAVQKQNDVHRAFKRELKTKEPVIMSTLETVRIFLTEQPLEGLEKLYQEPRELPPEERAQNVTRLLRKQAEEVNTEWEKLNLHSADWQRKIDETLERLRELQEATDELDLKLRQAEVIKGSWQPVGDLLIDSLQDHLEKVKALRGEIAPLKENVSHVNDLARQLTTLGIQLSPYNLSTLEDLNTRWKLLQVAVEDRVRQLHEAHRDFGPASQHFLSTSVQGPWERAISPNKVPYYINHETQTTCWDHPKMTELYQSLADLNNVRFSAYRTAMKLRRLQKALCLDLLSLSAACDALDQHNLKQNDQPMDILQIINCLTTIYDRLEQEHNNLVNVPLCVDMCLNWLLNVYDTGRTGRIRVLSFKTGIISLCKAHLEDKYRYLFKQVASSTGFCDQRRLGLLLHDSIQIPRQLGEVASFGGSNIEPSVRSCFQFSQSLETTALFSVPVILPFPELDFKGL

SEQ ID NO: 436 - DNA, 10795 bp, Homo sapiens
actttccccctacaggactcagatctgggaggcaattaccttcggagaaaaacgaataggaaaaactgaagtgttactttttttaaagctgctgaagtttgttggtttctcattgtttttaagcctactggagcaataaagtttgaagaacttttaccaggttttttttatcgctgccttgatatacacttttcaaaatgctttggtgggaagaagtagaggactgttatgaaagagaagatgttcaaaagaaaacattcacaaaatgggtaaatgcacaattttctaagtttgggaagcagcatattgagaacctcttcagtgacctacaggatgggaggcgcctcctagacctcctcgaaggcctgacagggcaaaaactgccaaaagaaaaaggatccacaagagttcatgccctgaacaatgtcaacaaggcactgcgggttttgcagaacaataatgttgatttagtgaatattggaagtactgacatcgtagatggaaatcataaactgactcttggtttgatttggaatataatcctccactggcaggtcaaaaatgtaatgaaaaatatcatggctggattgcaacaaaccaacagtgaaaagattctcctgagctgggtccgacaatcaactcgtaattatccacaggttaatgtaatcaacttcaccaccagctggtctgatggcctggctttgaatgctctcatccatagtcataggccagacctatttgactggaatagtgtggtttgccagcagtcagccacacaacgactggaacatgcattcaacatcgccagatatcaattaggcatagagaaactactcgatcctgaagatgttgataccacctatccagataagaagtccatcttaatgtacatcacatcactcttccaagttttgcctcaacaagtgagcattgaagccatccaggaagtggaaatgttgccaaggccacctaaagtgactaaagaagaacattttcagttacatcatcaaatgcactattctcaacagatcacggtcagtctagcacagggatatgagagaacttcttcccctaagcctcgattcaagagctatgcctacacacaggctgcttatgtcaccacctctgaccctacacggagcccatttccttcacagcatttggaagctcctgaagacaagtcatttggcagttcattgatggagagtgaagtaaacctggaccgttatcaaacagctttagaagaagtattatcgtggcttctttctgctgaggacacattgcaagcacaaggagagatttctaatgatgtggaagtggtgaaagaccagtttcatactcatgaggggtacatgatggatttgacagcccatcagggccgggttggtaatattctacaattgggaagtaagctgattggaacaggaaaattatcagaagatgaagaaactgaagtacaagagcagatgaatctcctaaattcaagatgggaatgcctcagggtagctagcatggaaaaacaaagcaatttacatagagttttaatggatctccagaatcagaaactgaaagagttgaatgactggctaacaaaaacagaagaaagaacaaggaaaatggaggaagagcctcttggacctgatcttgaagacctaaaacgccaagtacaacaacataaggtgcttcaagaagatctagaacaagaacaagtcagggtcaattctctcactcacatggtggtggtagttgatgaatctagtggagatcacgcaactgctgctttggaagaacaacttaaggtattgggagatcgatgggcaaacatctgtagatggacagaagaccgctgggttcttttacaagacatccttctcaaatggcaacgtcttactgaagaacagtgcctttttagtgcatggctttcagaaaaagaagatgcagtgaacaagattcacacaactggctttaaagatcaaaatgaaatgttatcaagtcttcaaaaactggccgttttaaaagcggatctagaaaagaaaaagcaatccatgggcaaactgtattcactcaaacaagatcttctttcaacactgaagaataagtcagtgacccagaagacggaagcatggctggataactttgcccggtgttgggataatttagtccaaaaacttgaaaagagtacagcacagatttcacaggctgtcaccaccactcagccatcactaacacagacaactgtaatggaaacagtaactacggtgaccacaagggaacagatcctggtaaagcatgctcaagaggaacttccaccaccacctccccaaaagaagaggcagattactgtggattctgaaattaggaaaaggttggatgttgatataactgaacttcacagctggattactcgctcagaagctgtgttgcagagtcctgaatttgcaatctttcggaaggaaggcaacttctcagacttaaaagaaaaagtcaatgccatagagcgagaaaaagctgagaagttcagaaaactgcaagatgccagcagatcagctcaggccctggtggaacagatggtgaatgagggtgttaatgcagatagcatcaaacaagcctcagaacaactgaacagccggtggatcgaattctgccagttgctaagtgagagacttaactggctggagtatcagaacaacatcatcgctttctataatcagctacaacaattggagcagatgacaactactgctgaaaactggttgaaaatccaacccaccaccccatcagagccaacagcaattaaaagtcagttaaaaatttgtaaggatgaagtcaaccggctatcagatcttcaacctcaaattgaacgattaaaaattcaaagcatagccctgaaagagaaaggacaaggacccatgttcctggatgcagactttgtggcctttacaaatcattttaagcaagtcttttctgatgtgcaggccagagagaaagagctacagacaatttttgacactttgccaccaatgcgctatcaggagaccatgagtgccatcaggacatgggtccagcagtcagaaaccaaactctccatacctcaacttagtgtcaccgactatgaaatcatggagcagagactcggggaattgcaggctttacaaagttctctgcaagagcaacaaagtggcctatactatctcagcaccactgtgaaagagatgtcgaagaaagcgccctctgaaattagccggaaatatcaatcagaatttgaagaaattgagggacgctggaagaagctctcctcccagctggttgagcattgtcaaaagctagaggagcaaatgaataaactccgaaaaattcagaatcacatacaaaccctgaagaaatggatggctgaagttgatgtttttctgaaggaggaatggcctgcccttggggattcagaaattctaaaaaagcagctgaaacagtgcagacttttagtcagtgatattcagacaattcagcccagtctaaacagtgtcaatgaaggtgggcagaagataaagaatgaagcagagccagagtttgcttcgagacttgagacagaactcaaagaacttaacactcagtgggatcacatgtgccaacaggtctatgccagaaaggaggccttgaagggaggtttggagaaaactgtaagcctccagaaagatctatcagagatgcacgaatggatgacacaagctgaagaagagtatcttgagagagattttgaatataaaactccagatgaattacagaaagcagttgaagagatgaagagagctaaagaagaggcccaacaaaaagaagcgaaagtgaaactccttactgagtctgtaaatagtgtcatagctcaagctccacctgtagcacaagaggccttaaaaaaggaacttgaaactctaaccaccaactaccagtggctctgcactaggctgaatgggaaatgcaagactttggaagaagtttgggcatgttggcatgagttattgtcatacttggagaaagcaaacaagtggctaaatgaagtagaatttaaacttaaaaccactgaaaacattcctggcggagctgaggaaatctctgaggtgctagattcacttgaaaatttgatgcgacattcagaggataacccaaatcagattcgcatattggcacagaccctaacagatggcggagtcatggatgagctaatcaatgaggaacttgagacatttaattctcgttggagggaactacatgaagaggctgtaaggaggcaaaagttgcttgaacagagcatccagtctgcccaggagactgaaaaatccttacacttaatccaggagtccctcacattcattgacaagcagttggcagcttatattgcagacaaggtggacgcagctcaaatgcctcaggaagcccagaaaatccaatctgatttgacaagtcatgagatcagtttagaagaaatgaagaaacataatcaggggaaggaggctgcccaaagagtcctgtctcagattgatgttgcacagaaaaaattacaagatgtctccatgaagtttcgattattccagaaaccagccaattttgagcagcgtctacaagaaagtaagatgattttagatgaagtgaagatgcacttgcctgcattggaaacaaagagtgtggaacaggaagtagtacagtcacagctaaatcattgtgtgaacttgtataaaagtctgagtgaagtgaagtctgaagtggaaatggtgataaagactggacgtcagattgtacagaaaaagcagacggaaaatcccaaagaacttgatgaaagagtaacagctttgaaattgcattataatgagctgggagcaaaggtaacagaaagaaagcaacagttggagaaatgcttgaaattgtcccgtaagatgcgaaaggaaatgaatgtcttgacagaatggctggcagctacagatatggaattgacaaagagatcagcagttgaaggaatgcctagtaatttggattctgaagttgcctggggaaaggctactcaaaaagagattgagaaacagaaggtgcacctgaagagtatcacagaggtaggagaggccttgaaaacagttttgggcaagaaggagacgttggtggaagataaactcagtcttctgaatagtaactggatagctgtcacctcccgagcagaagagtggttaaatcttttgttggaataccagaaacacatggaaacttttgaccagaatgtggaccacatcacaaagtggatcattcaggctgacacacttttggatgaatcagagaaaaagaaaccccagcaaaaagaagacgtgcttaagcgtttaaaggcagaactgaatgacatacgcccaaaggtggactctacacgtgaccaagcagcaaacttgatggcaaaccgcggtgaccactgcaggaaattagtagagccccaaatctcagagctcaaccatcgatttgcagccatttcacacagaattaagactggaaaggcctccattcctttgaaggaattggagcagtttaactcagatatacaaaaattgcttgaaccactggaggctgaaattcagcagggggtgaatctgaaagaggaagacttcaataaagatatgaatgaagacaatgagggtactgtaaaagaattgttgcaaagaggagacaacttacaacaaagaatcacagatgagagaaagcgagaggaaataaagataaaacagcagctgttacagacaaaacataatgctctcaaggatttgaggtctcaaagaagaaaaaaggctctagaaatttctcatcagtggtatcagtacaagaggcaggctgatgatctcctgaaatgcttggatgacattgaaaaaaaattagccagcctacctgagcccagagatgaaaggaaaataaaggaaattgatcgggaattgcagaagaagaaagaggagctgaatgcagtgcgtaggcaagctgagggcttgtctgaggatggggccgcaatggcagtggagccaactcagatccagctcagcaagcgctggcgggaaattgagagcaaatttgctcagtttcgaagactcaactttgcacaaattcacactgtccgtgaagaaacgatgatggtgatgactgaagacatgcctttggaaatttcttatgtgccttctacttatttgactgaaatcactcatgtctcacaagccctattagaagtggaacaacttctcaatgctcctgacctctgtgctaaggactttgaagatctctttaagcaagaggagtctctgaagaatataaaagatagtctacaacaaagctcaggtcggattgacattattcatagcaagaagacagcagcattgcaaagtgcaacgcctgtggaaagggtgaagctacaggaagctctctcccagcttgatttccaatgggaaaaagttaacaaaatgtacaaggaccgacaagggcgatttgacagatctgttgagaaatggcggcgttttcattatgatataaagatatttaatcagtggctaacagaagctgaacagtttctcagaaagacacaaattcctgagaattgggaacatgctaaatacaaatggtatcttaagagaacaggagacagaggacttatccttcttgatgatgtcatttgaaaagaatggctttcaggtccttgagtgagagacacttctgatttccaagagctacatgttcacaattgtaagcccttttgagtaaatgttctaagaaacggaggtaagagtcctatcaacagatgtgtgttggctagaacaaacattaaattttcctggcagcactgagctttctcaagcaggcacttaagggaaggctagggtcatcctagggacatggccttctggggctagaaaccatactagagtttagtcaagtcttagtgcaagggtttggacagagttgttaagtgctgagagttctgtatttctcactgtcacaaaggaagatcagaagctcctgatacttttttcatcagtacaattgaatatataaatcctatacacaaaaataaactaagcttatacaagcatattggtcaaggaatgttgctggccttattaattagatagcccagttaaaagaagaattttttaatataattaatgttaaagtaggatgatagtatataaaacgtgtctactgtcctgaatacaaactaaactgtttggtttagcatttacctcaagatctcttaatatcccccaaagggtccctaaaaccacaacttatctttgtgctcatgaagtagagaagagacagttaatagacatttctagctgatagactgttgtagagcagagaacgctctgtgtttttgaaaattaaacatatgaatttgcccctcttcccctattaaggaagaagagtttcttaattgtgcgaacacatcaagtgaactattcaattagatttttgtgacccagggtataaacatctggttaaggttacatatttcaaaggaacaaaacactagaaactcttggttttaaatctcatggctggaggataatttgcagcagagatttatctggcaagcatacagaattgctgagactgttctaaagatgtaagtgtgggtgtttgtgtcgtgaaaatagctgtttacatctattaagtggataccgatggttgaaagtgccgtctatgtcaagtttttaccaaatcaacttttgcctcactgtgtcagaccattttacctaatcaacttggactgctaatgtcctttcccctggcaccactatctgtctcttttgcaaagcacagaaacggcatgcatgattgtagtttataaaacacatgtaccaatgtggtctacagcttctgttgagttcgagagggtcagtttctgtaatctcttctggcacagagtcaagaacagcttcactttcctcctgctacctctctacccgtaagtgtgaacccatcactttgctaacactcaggaaggggattacacaaaatagagcaggagccctctgacctgaatatgcatctgagccctagccatagagcttctgattcagtagatctgggatggggcctaaatatttgcatttttaagtgtataagtgatgctgatgctgctggttccaggaccacattttaagaaatatcgataaaggtggagaattaaactgcagctcagaagacctgagttcttgccccagcttgacttttacaatctagcaaatggataaaactcgcaggacttcagttctcttcatctacacagtgagtggttagattggctttgtaatttaaaattaaacagggtttgattctgattcactacacaaggttccaaagaaggaatgatatctcctttcatttcttcactttgtcttctgtccctaggtaatcttatctatgttcctgatttaacctaactaatgtttctgcaaagcttctaatatttacatctccagccctgaaactctcatttgaatgctagtcttatatacatacccccctgcctaattgacatctccacttaaatgtatcagaggcaactcagactcaacaaggaccaaactgaatgttcgaccttgtccttcaaacccgatacacatccaggttcctccatcccagtgaatgacactatccagttaagcaagccaaaagtctggattttttttcctcactcttcctcactgtccgtcaactaccattattaaatctgtcacctggtcctactgatttaaccttctcaatatctctacagtttttctttatgcccattagtatcctagtgcaagctaccatcgtctctcattggaattaacacagtaacccccctacccaccagactgttctgcctacagatagtgtgatatttaataaatataaatctagccttggctagatttctccttcaaaaggttcacattaattttagccttaaaatggtgtgcaaagctttgcatagtctgtcctttgctatgttggcagtattttttactatccctctcatctgctcattctctgtactccaactacactaactttgtttttttttttttttagatttctctaactacagtgctgtaatctctttttcctttgcacgtactattccgtttgtcagggaatctgctcactgtctccacccactccacacactcacgttttcctgcccgtcttaccggtcttgatcggttgtcacttgctcaggaaggtttccctggtcaccccctccacaaattgaattaagtcctcttgctgcatgctgtcctagtgctctttattttcctctcctcatccttaattcagtttgtaattacatgttatttgtgtgaggatttgattattatctgtgtcacccactagatattgggcattctttacttactcaccactgaattcatagaaccacagtaattgtacacaacaaatattcaagagaaatttattgaattgatgaatgaaaagttgtaccttaacatgttcctgacatgtatccaaaaaagagctcccctttggggtctattaggactttggacctaggtaaacgtaaccctagtttcgctcaggtttaaacagtagaaagtaattgggtctcttttgcatgtggctttcctaagggctaaccctgtcttcggaatgagtcaatacagcagagctgttgaaagcagactctagcttcggacaacgttggtccgaatcatggttccgtcatttcttagctgtgtgatttagaataaattaatgttttaaagctttgatttcctcttccttaatctggagatgctaataaagccaacttcgtagaggtattgcgatgagtaaataagcataatttgctgtaaacaccttgcagattgcctgttgtatgctaactaatcaataaattgaagctcttaacatcattatattagatatttccagcattgagtatactatcaggcatgtggtagaagctcaatataaagttttgttaaattgaatagattccatatatggtatttctacagcattatgctccttatttaagtgtctctaagtattttttaagtatcacctcacaaaagacagatgtttaattcattacacatgtgaattgttttagatagaaaataaaataaaaaattcaaacattgaaatcaatagtgtaccttaccttaggattacaccataaaatttctaccaatcgagaataaagtgtacagtctatttcctttctaatacttttaacgcaacaaatgtttattgaacacttactacttctaatctatgacagacataaagatgaataaagcatgccacaatgtttaaaggagctcactatatcataagaaagcggattcacacagacaactctataagataaagtggtaaatttaggctggcctgtgaaacaaaggattataggtatagttaagaggtggaatttattttacttcgaggatttcagttacctttatattctttgtctaacctttcatgtttctctttcttcagaaacagagcacctttttcctgacacattcatttccccctatggagtagagcagttgttttcaaagtgtgggtcccagatcagcatcacggggatggttagaaatgcccattcttgagcctcacaacagacctactgaaacagaaattcttggagagtggagcccgcagatctgtgatcaagccctgtaggcaattctaacgcacactcaagttaaagaaccacgggaagaaaggtccatcctgtaacaagacagatttttttcattagcatcaa

SEQ ID NO: 437 - protein, 2160 aa, Homo sapiens
MLWWEEVEDCYEREDVQKKTFTKWVNAQFSKFGKQHIENLFSDLQDGRRLLDLLEGLTGQKLPKEKGSTRVHALNNVNKALRVLQNNNVDLVNIGSTDIVDGNHKLTLGLIWNIILHWQVKNVMKNIMAGLQQTNSEKILLSWVRQSTRNYPQVNVINFTTSWSDGLALNALIHSHRPDLFDWNSVVCQQSATQRLEHAFNIARYQLGIEKLLDPEDVDTTYPDKKSILMYITSLFQVLPQQVSIEAIQEVEMLPRPPKVTKEEHFQLHHQMHYSQQITVSLAQGYERTSSPKPRFKSYAYTQAAYVTTSDPTRSPFPSQHLEAPEDKSFGSSLMESEVNLDRYQTALEEVLSWLLSAEDTLQAQGEISNDVEVVKDQFHTHEGYMMDLTAHQGRVGNILQLGSKLIGTGKLSEDEETEVQEQMNLLNSRWECLRVASMEKQSNLHRVLMDLQNQKLKELNDWLTKTEERTRKMEEEPLGPDLEDLKRQVQQHKVLQEDLEQEQVRVNSLTHMVVVVDESSGDHATAALEEQLKVLGDRWANICRWTEDRWVLLQDILLKWQRLTEEQCLFSAWLSEKEDAVNKIHTTGFKDQNEMLSSLQKLAVLKADLEKKKQSMGKLYSLKQDLLSTLKNKSVTQKTEAWLDNFARCWDNLVQKLEKSTAQISQAVTTTQPSLTQTTVMETVTTVTTREQILVKHAQEELPPPPPQKKRQITVDSEIRKRLDVDITELHSWITRSEAVLQSPEFAIFRKEGNFSDLKEKVNAIEREKAEKFRKLQDASRSAQALVEQMVNEGVNADSIKQASEQLNSRWIEFCQLLSERLNWLEYQNNIIAFYNQLQQLEQMTTTAENWLKIQPTTPSEPTAIKSQLKICKDEVNRLSDLQPQIERLKIQSIALKEKGQGPMFLDADFVAFTNHFKQVFSDVQAREKELQTIFDTLPPMRYQETMSAIRTWVQQSETKLSIPQLSVTDYEIMEQRLGELQALQSSLQEQQSGLYYLSTTVKEMSKKAPSEISRKYQSEFEEIEGRWKKLSSQLVEHCQKLEEQMNKLRKIQNHIQTLKKWMAEVDVFLKEEWPALGDSEILKKQLKQCRLLVSDIQTIQPSLNSVNEGGQKIKNEAEPEFASRLETELKELNTQWDHMCQQVYARKEALKGGLEKTVSLQKDLSEMHEWMTQAEEEYLERDFEYKTPDELQKAVEEMKRAKEEAQQKEAKVKLLTESVNSVIAQAPPVAQEALKKELETLTTNYQWLCTRLNGKCKTLEEVWACWHELLSYLEKANKWLNEVEFKLKTTENIPGGAEEISEVLDSLENLMRHSEDNPNQIRILAQTLTDGGVMDELINEELETFNSRWRELHEEAVRRQKLLEQSIQSAQETEKSLHLIQESLTFIDKQLAAYIADKVDAAQMPQEAQKIQSDLTSHEISLEEMKKHNQGKEAAQRVLSQIDVAQKKLQDVSMKFRLFQKPANFEQRLQESKMILDEVKMHLPALETKSVEQEVVQSQLNHCVNLYKSLSEVKSEVEMVIKTGRQIVQKKQTENPKELDERVTALKLHYNELGAKVTERKQQLEKCLKLSRKMRKEMNVLTEWLAATDMELTKRSAVEGMPSNLDSEVAWGKATQKEIEKQKVHLKSITEVGEALKTVLGKKETLVEDKLSLLNSNWIAVTSRAEEWLNLLLEYQKHMETFDQNVDHITKWIIQADTLLDESEKKKPQQKEDVLKRLKAELNDIRPKVDSTRDQAANLMANRGDHCRKLVEPQISELNHRFAAISHRIKTGKASIPLKELEQFNSDIQKLLEPLEAEIQQGVNLKEEDFNKDMNEDNEGTVKELLQRGDNLQQRITDERKREEIKIKQQLLQTKHNALKDLRSQRRKKALEISHQWYQYKRQADDLLKCLDDIEKKLASLPEPRDERKIKEIDRELQKKKEELNAVRRQAEGLSEDGAAMAVEPTQIQLSKRWREIESKFAQFRRLNFAQIHTVREETMMVMTEDMPLEISYVPSTYLTEITHVSQALLEVEQLLNAPDLCAKDFEDLFKQEESLKNIKDSLQQSSGRIDIIHSKKTAALQSATPVERVKLQEALSQLDFQWEKVNKMYKDRQGRFDRSVEKWRRFHYDIKIFNQWLTEAEQFLRKTQIPENWEHAKYKWYLKRTGDRGLILLDDVI

SEQ ID NO: 438 - DNA, 8969 bp, Homo sapiens
actttccccctacaggactcagatctgggaggcaattaccttcggagaaaaacgaataggaaaaactgaagtgttactttttttaaagctgctgaagtttgttggtttctcattgtttttaagcctactggagcaataaagtttgaagaacttttaccaggttttttttatcgctgccttgatatacacttttcaaaatgctttggtgggaagaagtagaggactgttatgaaagagaagatgttcaaaagaaaacattcacaaaatgggtaaatgcacaattttctaagtttgggaagcagcatattgagaacctcttcagtgacctacaggatgggaggcgcctcctagacctcctcgaaggcctgacagggcaaaaactgccaaaagaaaaaggatccacaagagttcatgccctgaacaatgtcaacaaggcactgcgggttttgcagaacaataatgttgatttagtgaatattggaagtactgacatcgtagatggaaatcataaactgactcttggtttgatttggaatataatcctccactggcaggtcaaaaatgtaatgaaaaatatcatggctggattgcaacaaaccaacagtgaaaagattctcctgagctgggtccgacaatcaactcgtaattatccacaggttaatgtaatcaacttcaccaccagctggtctgatggcctggctttgaatgctctcatccatagtcataggccagacctatttgactggaatagtgtggtttgccagcagtcagccacacaacgactggaacatgcattcaacatcgccagatatcaattaggcatagagaaactactcgatcctgaagatgttgataccacctatccagataagaagtccatcttaatgtacatcacatcactcttccaagttttgcctcaacaagtgagcattgaagccatccaggaagtggaaatgttgccaaggccacctaaagtgactaaagaagaacattttcagttacatcatcaaatgcactattctcaacagatcacggtcagtctagcacagggatatgagagaacttcttcccctaagcctcgattcaagagctatgcctacacacaggctgcttatgtcaccacctctgaccctacacggagcccatttccttcacagcatttggaagctcctgaagacaagtcatttggcagttcattgatggagagtgaagtaaacctggaccgttatcaaacagctttagaagaagtattatcgtggcttctttctgctgaggacacattgcaagcacaaggagagatttctaatgatgtggaagtggtgaaagaccagtttcatactcatgaggggtacatgatggatttgacagcccatcagggccgggttggtaatattctacaattgggaagtaagctgattggaacaggaaaattatcagaagatgaagaaactgaagtacaagagcagatgaatctcctaaattcaagatgggaatgcctcagggtagctagcatggaaaaacaaagcaatttacatagagttttaatggatctccagaatcagaaactgaaagagttgaatgactggctaacaaaaacagaagaaagaacaaggaaaatggaggaagagcctcttggacctgatcttgaagacctaaaacgccaagtacaacaacataaggtgcttcaagaagatctagaacaagaacaagtcagggtcaattctctcactcacatggtggtggtagttgatgaatctagtggagatcacgcaactgctgctttggaagaacaacttaaggtattgggagatcgatgggcaaacatctgtagatggacagaagaccgctgggttcttttacaagacatccttctcaaatggcaacgtcttactgaagaacagtgcctttttagtgcatggctttcagaaaaagaagatgcagtgaacaagattcacacaactggctttaaagatcaaaatgaaatgttatcaagtcttcaaaaactggccgttttaaaagcggatctagaaaagaaaaagcaatccatgggcaaactgtattcactcaaacaagatcttctttcaacactgaagaataagtcagtgacccagaagacggaagcatggctggataactttgcccggtgttgggataatttagtccaaaaacttgaaaagagtacagcacagatttcacaggctgtcaccaccactcagccatcactaacacagacaactgtaatggaaacagtaactacggtgaccacaagggaacagatcctggtaaagcatgctcaagaggaacttccaccaccacctccccaaaagaagaggcagattactgtggattctgaaattaggaaaaggttggatgttgatataactgaacttcacagctggattactcgctcagaagctgtgttgcagagtcctgaatttgcaatctttcggaaggaaggcaacttctcagacttaaaagaaaaagtcaatgccatagagcgagaaaaagctgagaagttcagaaaactgcaagatgccagcagatcagctcaggccctggtggaacagatggtgaatgagggtgttaatgcagatagcatcaaacaagcctcagaacaactgaacagccggtggatcgaattctgccagttgctaagtgagagacttaactggctggagtatcagaacaacatcatcgctttctataatcagctacaacaattggagcagatgacaactactgctgaaaactggttgaaaatccaacccaccaccccatcagagccaacagcaattaaaagtcagttaaaaatttgtaaggatgaagtcaaccggctatcagatcttcaacctcaaattgaacgattaaaaattcaaagcatagccctgaaagagaaaggacaaggacccatgttcctggatgcagactttgtggcctttacaaatcattttaagcaagtcttttctgatgtgcaggccagagagaaagagctacagacaatttttgacactttgccaccaatgcgctatcaggagaccatgagtgccatcaggacatgggtccagcagtcagaaaccaaactctccatacctcaacttagtgtcaccgactatgaaatcatggagcagagactcggggaattgcaggctttacaaagttctctgcaagagcaacaaagtggcctatactatctcagcaccactgtgaaagagatgtcgaagaaagcgccctctgaaattagccggaaatatcaatcagaatttgaagaaattgagggacgctggaagaagctctcctcccagctggttgagcattgtcaaaagctagaggagcaaatgaataaactccgaaaaattcagaatcacatacaaaccctgaagaaatggatggctgaagttgatgtttttctgaaggaggaatggcctgcccttggggattcagaaattctaaaaaagcagctgaaacagtgcagacttttagtcagtgatattcagacaattcagcccagtctaaacagtgtcaatgaaggtgggcagaagataaagaatgaagcagagccagagtttgcttcgagacttgagacagaactcaaagaacttaacactcagtgggatcacatgtgccaacaggtctatgccagaaaggaggccttgaagggaggtttggagaaaactgtaagcctccagaaagatctatcagagatgcacgaatggatgacacaagctgaagaagagtatcttgagagagattttgaatataaaactccagatgaattacagaaagcagttgaagagatgaagagagctaaagaagaggcccaacaaaaagaagcgaaagtgaaactccttactgagtctgtaaatagtgtcatagctcaagctccacctgtagcacaagaggccttaaaaaaggaacttgaaactctaaccaccaactaccagtggctctgcactaggctgaatgggaaatgcaagactttggaagaagtttgggcatgttggcatgagttattgtcatacttggagaaagcaaacaagtggctaaatgaagtagaatttaaacttaaaaccactgaaaacattcctggcggagctgaggaaatctctgaggtgctagattcacttgaaaatttgatgcgacattcagaggataacccaaatcagattcgcatattggcacagaccctaacagatggcggagtcatggatgagctaatcaatgaggaacttgagacatttaattctcgttggagggaactacatgaagaggctgtaaggaggcaaaagttgcttgaacagagcatccagtctgcccaggagactgaaaaatccttacacttaatccaggagtccctcacattcattgacaagcagttggcagcttatattgcagacaaggtggacgcagctcaaatgcctcaggaagcccagaaaatccaatctgatttgacaagtcatgagatcagtttagaagaaatgaagaaacataatcaggggaaggaggctgcccaaagagtcctgtctcagattgatgttgcacagaaaaaattacaagatgtctccatgaagtttcgattattccagaaaccagccaattttgagcagcgtctacaagaaagtaagatgattttagatgaagtgaagatgcacttgcctgcattggaaacaaagagtgtggaacaggaagtagtacagtcacagctaaatcattgtgtgaacttgtataaaagtctgagtgaagtgaagtctgaagtggaaatggtgataaagactggacgtcagattgtacagaaaaagcagacggaaaatcccaaagaacttgatgaaagagtaacagctttgaaattgcattataatgagctgggagcaaaggtaacagaaagaaagcaacagttggagaaatgcttgaaattgtcccgtaagatgcgaaaggaaatgaatgtcttgacagaatggctggcagctacagatatggaattgacaaagagatcagcagttgaaggaatgcctagtaatttggattctgaagttgcctggggaaaggctactcaaaaagagattgagaaacagaaggtgcacctgaagagtatcacagaggtaggagaggccttgaaaacagttttgggcaagaaggagacgttggtggaagataaactcagtcttctgaatagtaactggatagctgtcacctcccgagcagaagagtggttaaatcttttgttggaataccagaaacacatggaaacttttgaccagaatgtggaccacatcacaaagtggatcattcaggctgacacacttttggatgaatcagagaaaaagaaaccccagcaaaaagaagacgtgcttaagcgtttaaaggcagaactgaatgacatacgcccaaaggtggactctacacgtgaccaagcagcaaacttgatggcaaaccgcggtgaccactgcaggaaattagtagagccccaaatctcagagctcaaccatcgatttgcagccatttcacacagaattaagactggaaaggcctccattcctttgaaggaattggagcagtttaactcagatatacaaaaattgcttgaaccactggaggctgaaattcagcagggggtgaatctgaaagaggaagacttcaataaagatatgaatgaagacaatgagggtactgtaaaagaattgttgcaaagaggagacaacttacaacaaagaatcacagatgagagaaagcgagaggaaataaagataaaacagcagctgttacagacaaaacataatgctctcaaggatttgaggtctcaaagaagaaaaaaggctctagaaatttctcatcagtggtatcagtacaagaggcaggctgatgatctcctgaaatgcttggatgacattgaaaaaaaattagccagcctacctgagcccagagatgaaaggaaaataaaggaaattgatcgggaattgcagaagaagaaagaggagctgaatgcagtgcgtaggcaagctgagggcttgtctgaggatggggccgcaatggcagtggagccaactcagatccagctcagcaagcgctggcgggaaattgagagcaaatttgctcagtttcgaagactcaactttgcacaaattcacactgtccgtgaagaaacgatgatggtgatgactgaagacatgcctttggaaatttcttatgtgccttctacttatttgactgaaatcactcatgtctcacaagccctattagaagtggaacaacttctcaatgctcctgacctctgtgctaaggactttgaagatctctttaagcaagaggagtctctgaagaatataaaagatagtctacaacaaagctcaggtcggattgacattattcatagcaagaagacagcagcattgcaaagtgcaacgcctgtggaaagggtgaagctacaggaagctctctcccagcttgatttccaatgggaaaaagttaacaaaatgtacaaggaccgacaagggcgatttgacagatctgttgagaaatggcggcgttttcattatgatataaagatatttaatcagtggctaacagaagctgaacagtttctcagaaagacacaaattcctgagaattgggaacatgctaaatacaaatggtatcttaagatctccgagaggcagaaaaaggggaactgtgcaacccttttgtccttctggatctcaaaatgaagggatacattctgctacatgaaatgtggaattaagaccatgatgcaacatgataaacaacacaaatttgggggtgtctctgtgctatacattattgaatttttccatgctatacactttttggatgtgtctgtgctatttattcagtttttttaaataaaagtttttgtagactaaattgccctctctactttgcatcgtttttgaacaaaggattttcaagactgataagctcaaatgtatcatttattgtattcaagtagcattcaatttttctttagaagtataatttgtagatattttaacacagaaaacttgcaacactgctcatgataggcacttattatatattttttgaaagactatatggataatgattctaactttgacttttcctgttttgccttcactttagaattaagcagagaatcaaatccatattcctgggggcgatgcttggacaacagtatctctttaaagatctttgtgtgagtcgaaggtgcagccagactgggagttattgtgaagaaacagattcaggaaggttgagaaacttgcctaaggctaatcagatagttactggcaatgttgtttctaaatcactgtttggctccctcattcaatgaatctacactatgtgggactgcctcttgctcctgacatcttttgctgctgaaataaatgaactcaaagcctagaaggtagaaaagagggagttcagaattatattcaggcacaaataccaataaggctattgcccccagaactgcaacttctcttggtttaacagataactatttagctgtgaggtacaactgaggaagtggacacacaagttatcaggagattctgatgtgccagtttatatttcttgtcacaggtaatgattcgaaatttcttaaaacagctgtcctcacagtggagtaacctgggagtacatgaaggcattccaaggagtaggcacagatagttttaagggaatttatttctagatcttctactttattttgtactcttcctgaaaactgaattgcctgaaaaaaaaaaaaaaaaaaaaaagacatctgtagtcaagacctcaggctgtttctcctttctaaccacttgccttttctaaccacttctcccaatttaagaaaaaaagccttatatttcatccaactctgatcttactaaggcttcaaacaaaagaagcatgaatgactttcatgacagggcaacatagctttttgcaagaagagtggttgctaactctttgctttcaactgaacccgaagagaagacctgataagttgtcagccgatagatcattaaaaatacgttttggtaagcaatcatcatgtacttttagcatatgccatagcaggagcacaaatgattaagcaatgctactataatacaattccttccgtttctttctactcacctatttgaataagatttttcatcatttacatctatacagacaaaaattagggatagaattgatgctgaagcctttccaattgtagaattaatttatattcttctgaaggtgtataaattgttaaatacccatccatcttattaagagatgtattttcaataaaattttatttttatgtttatcaaattttataatatacatatattgttttggtcaattgcacgttaataattgtaacaatacctcaattgaaaaggtttgttttttacatttaggacttacagtaacagaaaaaaaacactcattgtgtatacatactgtttaagaaaagtatactaggtgatcaataagattttttcaggcataaacatatatcttagttttaagatatcgatatttacaatgtccctcaaattatattattttcagtcatttaagaatgaaaagtacatttcgaatgcggattttaaatctgcaagggttgactcatttttcaagagtctttttaggggatacagaagcaagaatgtttggagttccctgatcagtatctttaagagaaggtatttgttggtagttcctagcaaattccaacagcctgatgctacttaaaagataatagtaattattttaaataatgcttctgataaaaaacattcatgcacactcagtttaaaaagatatttaaacatttgtagttgtagtttgggaactcatgatacaagtacagtctgtaaatgaagctcttagtttgcaaatatcagagataagctattaaaatgcagaaattgaaattgccctgatatatgcataaattagtgtcatctccatcttgtcagttagag

SEQ ID NO: 439 - protein, 2166 aa, Homo sapiens
MLWWEEVEDCYEREDVQKKTFTKWVNAQFSKFGKQHIENLFSDLQDGRRLLDLLEGLTGQKLPKEKGSTRVHALNNVNKALRVLQNNNVDLVNIGSTDIVDGNHKLTLGLIWNIILHWQVKNVMKNIMAGLQQTNSEKILLSWVRQSTRNYPQVNVINFTTSWSDGLALNALIHSHRPDLFDWNSVVCQQSATQRLEHAFNIARYQLGIEKLLDPEDVDTTYPDKKSILMYITSLFQVLPQQVSIEAIQEVEMLPRPPKVTKEEHFQLHHQMHYSQQITVSLAQGYERTSSPKPRFKSYAYTQAAYVTTSDPTRSPFPSQHLEAPEDKSFGSSLMESEVNLDRYQTALEEVLSWLLSAEDTLQAQGEISNDVEVVKDQFHTHEGYMMDLTAHQGRVGNILQLGSKLIGTGKLSEDEETEVQEQMNLLNSRWECLRVASMEKQSNLHRVLMDLQNQKLKELNDWLTKTEERTRKMEEEPLGPDLEDLKRQVQQHKVLQEDLEQEQVRVNSLTHMVVVVDESSGDHATAALEEQLKVLGDRWANICRWTEDRWVLLQDILLKWQRLTEEQCLFSAWLSEKEDAVNKIHTTGFKDQNEMLSSLQKLAVLKADLEKKKQSMGKLYSLKQDLLSTLKNKSVTQKTEAWLDNFARCWDNLVQKLEKSTAQISQAVTTTQPSLTQTTVMETVTTVTTREQILVKHAQEELPPPPPQKKRQITVDSEIRKRLDVDITELHSWITRSEAVLQSPEFAIFRKEGNFSDLKEKVNAIEREKAEKFRKLQDASRSAQALVEQMVNEGVNADSIKQASEQLNSRWIEFCQLLSERLNWLEYQNNIIAFYNQLQQLEQMTTTAENWLKIQPTTPSEPTAIKSQLKICKDEVNRLSDLQPQIERLKIQSIALKEKGQGPMFLDADFVAFTNHFKQVFSDVQAREKELQTIFDTLPPMRYQETMSAIRTWVQQSETKLSIPQLSVTDYEIMEQRLGELQALQSSLQEQQSGLYYLSTTVKEMSKKAPSEISRKYQSEFEEIEGRWKKLSSQLVEHCQKLEEQMNKLRKIQNHIQTLKKWMAEVDVFLKEEWPALGDSEILKKQLKQCRLLVSDIQTIQPSLNSVNEGGQKIKNEAEPEFASRLETELKELNTQWDHMCQQVYARKEALKGGLEKTVSLQKDLSEMHEWMTQAEEEYLERDFEYKTPDELQKAVEEMKRAKEEAQQKEAKVKLLTESVNSVIAQAPPVAQEALKKELETLTTNYQWLCTRLNGKCKTLEEVWACWHELLSYLEKANKWLNEVEFKLKTTENIPGGAEEISEVLDSLENLMRHSEDNPNQIRILAQTLTDGGVMDELINEELETFNSRWRELHEEAVRRQKLLEQSIQSAQETEKSLHLIQESLTFIDKQLAAYIADKVDAAQMPQEAQKIQSDLTSHEISLEEMKKHNQGKEAAQRVLSQIDVAQKKLQDVSMKFRLFQKPANFEQRLQESKMILDEVKMHLPALETKSVEQEVVQSQLNHCVNLYKSLSEVKSEVEMVIKTGRQIVQKKQTENPKELDERVTALKLHYNELGAKVTERKQQLEKCLKLSRKMRKEMNVLTEWLAATDMELTKRSAVEGMPSNLDSEVAWGKATQKEIEKQKVHLKSITEVGEALKTVLGKKETLVEDKLSLLNSNWIAVTSRAEEWLNLLLEYQKHMETFDQNVDHITKWIIQADTLLDESEKKKPQQKEDVLKRLKAELNDIRPKVDSTRDQAANLMANRGDHCRKLVEPQISELNHRFAAISHRIKTGKASIPLKELEQFNSDIQKLLEPLEAEIQQGVNLKEEDFNKDMNEDNEGTVKELLQRGDNLQQRITDERKREEIKIKQQLLQTKHNALKDLRSQRRKKALEISHQWYQYKRQADDLLKCLDDIEKKLASLPEPRDERKIKEIDRELQKKKEELNAVRRQAEGLSEDGAAMAVEPTQIQLSKRWREIESKFAQFRRLNFAQIHTVREETMMVMTEDMPLEISYVPSTYLTEITHVSQALLEVEQLLNAPDLCAKDFEDLFKQEESLKNIKDSLQQSSGRIDIIHSKKTAALQSATPVERVKLQEALSQLDFQWEKVNKMYKDRQGRFDRSVEKWRRFHYDIKIFNQWLTEAEQFLRKTQIPENWEHAKYKWYLKISERQKKGNCATLLSFWISK

SEQ ID NO: 440 - DNA, 6156 bp, Homo sapiens
actttccccctacaggactcagatctgggaggcaattaccttcggagaaaaacgaataggaaaaactgaagtgttactttttttaaagctgctgaagtttgttggtttctcattgtttttaagcctactggagcaataaagtttgaagaacttttaccaggttttttttatcgctgccttgatatacacttttcaaaatgctttggtgggaagaagtagaggactgttatgaaagagaagatgttcaaaagaaaacattcacaaaatgggtaaatgcacaattttctaagtttgggaagcagcatattgagaacctcttcagtgacctacaggatgggaggcgcctcctagacctcctcgaaggcctgacagggcaaaaactgccaaaagaaaaaggatccacaagagttcatgccctgaacaatgtcaacaaggcactgcgggttttgcagaacaataatgttgatttagtgaatattggaagtactgacatcgtagatggaaatcataaactgactcttggtttgatttggaatataatcctccactggcaggtcaaaaatgtaatgaaaaatatcatggctggattgcaacaaaccaacagtgaaaagattctcctgagctgggtccgacaatcaactcgtaattatccacaggttaatgtaatcaacttcaccaccagctggtctgatggcctggctttgaatgctctcatccatagtcataggccagacctatttgactggaatagtgtggtttgccagcagtcagccacacaacgactggaacatgcattcaacatcgccagatatcaattaggcatagagaaactactcgatcctgaagatgttgataccacctatccagataagaagtccatcttaatgtacatcacatcactcttccaagttttgcctcaacaagtgagcattgaagccatccaggaagtggaaatgttgccaaggccacctaaagtgactaaagaagaacattttcagttacatcatcaaatgcactattctcaacagatcacggtcagtctagcacagggatatgagagaacttcttcccctaagcctcgattcaagagctatgcctacacacaggctgcttatgtcaccacctctgaccctacacggagcccatttccttcacagcatttggaagctcctgaagacaagtcatttggcagttcattgatggagagtgaagtaaacctggaccgttatcaaacagctttagaagaagtattatcgtggcttctttctgctgaggacacattgcaagcacaaggagagatttctaatgatgtggaagtggtgaaagaccagtttcatactcatgaggggtacatgatggatttgacagcccatcagggccgggttggtaatattctacaattgggaagtaagctgattggaacaggaaaattatcagaagatgaagaaactgaagtacaagagcagatgaatctcctaaattcaagatgggaatgcctcagggtagctagcatggaaaaacaaagcaatttacatagagttttaatggatctccagaatcagaaactgaaagagttgaatgactggctaacaaaaacagaagaaagaacaaggaaaatggaggaagagcctcttggacctgatcttgaagacctaaaacgccaagtacaacaacataaggtgcttcaagaagatctagaacaagaacaagtcagggtcaattctctcactcacatggtggtggtagttgatgaatctagtggagatcacgcaactgctgctttggaagaacaacttaaggtattgggagatcgatgggcaaacatctgtagatggacagaagaccgctgggttcttttacaagacatccttctcaaatggcaacgtcttactgaagaacagtgcctttttagtgcatggctttcagaaaaagaagatgcagtgaacaagattcacacaactggctttaaagatcaaaatgaaatgttatcaagtcttcaaaaactggccgttttaaaagcggatctagaaaagaaaaagcaatccatgggcaaactgtattcactcaaacaagatcttctttcaacactgaagaataagtcagtgacccagaagacggaagcatggctggataactttgcccggtgttgggataatttagtccaaaaacttgaaaagagtacagcacagatttcacaggctgtcaccaccactcagccatcactaacacagacaactgtaatggaaacagtaactacggtgaccacaagggaacagatcctggtaaagcatgctcaagaggaacttccaccaccacctccccaaaagaagaggcagattactgtggattctgaaattaggaaaaggttggatgttgatataactgaacttcacagctggattactcgctcagaagctgtgttgcagagtcctgaatttgcaatctttcggaaggaaggcaacttctcagacttaaaagaaaaagtcaatgccatagagcgagaaaaagctgagaagttcagaaaactgcaagatgccagcagatcagctcaggccctggtggaacagatggtgaatgagggtgttaatgcagatagcatcaaacaagcctcagaacaactgaacagccggtggatcgaattctgccagttgctaagtgagagacttaactggctggagtatcagaacaacatcatcgctttctataatcagctacaacaattggagcagatgacaactactgctgaaaactggttgaaaatccaacccaccaccccatcagagccaacagcaattaaaagtcagttaaaaatttgtaaggatgaagtcaaccggctatcagatcttcaacctcaaattgaacgattaaaaattcaaagcatagccctgaaagagaaaggacaaggacccatgttcctggatgcagactttgtggcctttacaaatcattttaagcaagtcttttctgatgtgcaggccagagagaaagagctacagacaatttttgacactttgccaccaatgcgctatcaggagaccatgagtgccatcaggacatgggtccagcagtcagaaaccaaactctccatacctcaacttagtgtcaccgactatgaaatcatggagcagagactcggggaattgcaggctttacaaagttctctgcaagagcaacaaagtggcctatactatctcagcaccactgtgaaagagatgtcgaagaaagcgccctctgaaattagccggaaatatcaatcagaatttgaagaaattgagggacgctggaagaagctctcctcccagctggttgagcattgtcaaaagctagaggagcaaatgaataaactccgaaaaattcagaatcacatacaaaccctgaagaaatggatggctgaagttgatgtttttctgaaggaggaatggcctgcccttggggattcagaaattctaaaaaagcagctgaaacagtgcagacttttagtcagtgatattcagacaattcagcccagtctaaacagtgtcaatgaaggtgggcagaagataaagaatgaagcagagccagagtttgcttcgagacttgagacagaactcaaagaacttaacactcagtgggatcacatgtgccaacaggtctatgccagaaaggaggccttgaagggaggtttggagaaaactgtaagcctccagaaagatctatcagagatgcacgaatggatgacacaagctgaagaagagtatcttgagagagattttgaatataaaactccagatgaattacagaaagcagttgaagagatgaagagagctaaagaagaggcccaacaaaaagaagcgaaagtgaaactccttactgagtctgtaaatagtgtcatagctcaagctccacctgtagcacaagaggccttaaaaaaggaacttgaaactctaaccaccaactaccagtggctctgcactaggctgaatgggaaatgcaagactttggaagaagtttgggcatgttggcatgagttattgtcatacttggagaaagcaaacaagtggctaaatgaagtagaatttaaacttaaaaccactgaaaacattcctggcggagctgaggaaatctctgaggtgctagattcacttgaaaatttgatgcgacattcagaggataacccaaatcagattcgcatattggcacagaccctaacagatggcggagtcatggatgagctaatcaatgaggaacttgagacatttaattctcgttggagggaactacatgaagaggctgtaaggaggcaaaagttgcttgaacagagcatccagtctgcccaggagactgaaaaatccttacacttaatccaggagtccctcacattcattgacaagcagttggcagcttatattgcagacaaggtggacgcagctcaaatgcctcaggaagcccagaaaatccaatctgatttgacaagtcatgagatcagtttagaagaaatgaagaaacataatcaggggaaggaggctgcccaaagagtcctgtctcagattgatgttgcacagaaaaaattacaagatgtctccatgaagtttcgattattccagaaaccagccaattttgagcagcgtctacaagaaagtaagatgattttagatgaagtgaagatgcacttgcctgcattggaaacaaagagtgtggaacaggaagtagtacagtcacagctaaatcattgtgtgaacttgtataaaagtctgagtgaagtgaagtctgaagtggaaatggtgataaagactggacgtcagattgtacagaaaaagcagacggaaaatcccaaagaacttgatgaaagagtaacagctttgaaattgcattataatgagctgggagcaaaggtaacagaaagaaagcaacagttggagaaatgcttgaaattgtcccgtaagatgcgaaaggaaatgaatgtcttgacagaatggctggcagctacagatatggaattgacaaagagatcagcagttgaaggaatgcctagtaatttggattctgaagttgcctggggaaaggctactcaaaaagagattgagaaacagaaggtgcacctgaagagtatcacagaggtaggagaggccttgaaaacagttttgggcaagaaggagacgttggtggaagataaactcagtcttctgaatagtaactggatagctgtcacctcccgagcagaagagtggttaaatcttttgttggaataccagaaacacatggaaacttttgaccagaatgtggaccacatcacaaagtggatcattcaggctgacacacttttggatgaatcagagaaaaagaaaccccagcaaaaagaagacgtgcttaagcgtttaaaggcagaactgaatgacatacgcccaaaggtggactctacacgtgaccaagcagcaaacttgatggcaaaccgcggtgaccactgcaggaaattagtagagccccaaatctcagagctcaaccatcgatttgcagccatttcacacagaattaagactggaaaggcctccattcctttgaaggaattggagcagtttaactcagatatacaaaaattgcttgaaccactggaggctgaaattcagcagggggtgaatctgaaagaggaagacttcaataaagatatgaatgaagacaatgagggtactgtaaaagaattgttgcaaagaggagacaacttacaacaaagaatcacagatgagagaaagcgagaggaaataaagataaaacagcagctgttacagacaaaacataatgctctcaaggatttgaggtctcaaagaagaaaaaaggctctagaaatttctcatcagtggtatcagtacaagaggcaggctgatgatctcctgaaatgcttggatgacattgaaaaaaaattagccagcctacctgagcccagagatgaaaggaaaataaagatgaactaatgacttatcggtatatggacgacttcttactcatgttagcccattcatttcatcagagcatcttcacacatcagtgttcactctctatagatttatttgcatattgtctaaatatgtttttttctgttattattttacactttttattttgcttcattctctgttgagttcctcaaacctttaaaaaggaaataaataacttattcactta

SEQ ID NO: 441 - protein, 1915 aa, Homo sapiens
MLWWEEVEDCYEREDVQKKTFTKWVNAQFSKFGKQHIENLFSDLQDGRRLLDLLEGLTGQKLPKEKGSTRVHALNNVNKALRVLQNNNVDLVNIGSTDIVDGNHKLTLGLIWNIILHWQVKNVMKNIMAGLQQTNSEKILLSWVRQSTRNYPQVNVINFTTSWSDGLALNALIHSHRPDLFDWNSVVCQQSATQRLEHAFNIARYQLGIEKLLDPEDVDTTYPDKKSILMYITSLFQVLPQQVSIEAIQEVEMLPRPPKVTKEEHFQLHHQMHYSQQITVSLAQGYERTSSPKPRFKSYAYTQAAYVTTSDPTRSPFPSQHLEAPEDKSFGSSLMESEVNLDRYQTALEEVLSWLLSAEDTLQAQGEISNDVEVVKDQFHTHEGYMMDLTAHQGRVGNILQLGSKLIGTGKLSEDEETEVQEQMNLLNSRWECLRVASMEKQSNLHRVLMDLQNQKLKELNDWLTKTEERTRKMEEEPLGPDLEDLKRQVQQHKVLQEDLEQEQVRVNSLTHMVVVVDESSGDHATAALEEQLKVLGDRWANICRWTEDRWVLLQDILLKWQRLTEEQCLFSAWLSEKEDAVNKIHTTGFKDQNEMLSSLQKLAVLKADLEKKKQSMGKLYSLKQDLLSTLKNKSVTQKTEAWLDNFARCWDNLVQKLEKSTAQISQAVTTTQPSLTQTTVMETVTTVTTREQILVKHAQEELPPPPPQKKRQITVDSEIRKRLDVDITELHSWITRSEAVLQSPEFAIFRKEGNFSDLKEKVNAIEREKAEKFRKLQDASRSAQALVEQMVNEGVNADSIKQASEQLNSRWIEFCQLLSERLNWLEYQNNIIAFYNQLQQLEQMTTTAENWLKIQPTTPSEPTAIKSQLKICKDEVNRLSDLQPQIERLKIQSIALKEKGQGPMFLDADFVAFTNHFKQVFSDVQAREKELQTIFDTLPPMRYQETMSAIRTWVQQSETKLSIPQLSVTDYEIMEQRLGELQALQSSLQEQQSGLYYLSTTVKEMSKKAPSEISRKYQSEFEEIEGRWKKLSSQLVEHCQKLEEQMNKLRKIQNHIQTLKKWMAEVDVFLKEEWPALGDSEILKKQLKQCRLLVSDIQTIQPSLNSVNEGGQKIKNEAEPEFASRLETELKELNTQWDHMCQQVYARKEALKGGLEKTVSLQKDLSEMHEWMTQAEEEYLERDFEYKTPDELQKAVEEMKRAKEEAQQKEAKVKLLTESVNSVIAQAPPVAQEALKKELETLTTNYQWLCTRLNGKCKTLEEVWACWHELLSYLEKANKWLNEVEFKLKTTENIPGGAEEISEVLDSLENLMRHSEDNPNQIRILAQTLTDGGVMDELINEELETFNSRWRELHEEAVRRQKLLEQSIQSAQETEKSLHLIQESLTFIDKQLAAYIADKVDAAQMPQEAQKIQSDLTSHEISLEEMKKHNQGKEAAQRVLSQIDVAQKKLQDVSMKFRLFQKPANFEQRLQESKMILDEVKMHLPALETKSVEQEVVQSQLNHCVNLYKSLSEVKSEVEMVIKTGRQIVQKKQTENPKELDERVTALKLHYNELGAKVTERKQQLEKCLKLSRKMRKEMNVLTEWLAATDMELTKRSAVEGMPSNLDSEVAWGKATQKEIEKQKVHLKSITEVGEALKTVLGKKETLVEDKLSLLNSNWIAVTSRAEEWLNLLLEYQKHMETFDQNVDHITKWIIQADTLLDESEKKKPQQKEDVLKRLKAELNDIRPKVDSTRDQAANLMANRGDHCRKLVEPQISELNHRFAAISHRIKTGKASIPLKELEQFNSDIQKLLEPLEAEIQQGVNLKEEDFNKDMNEDNEGTVKELLQRGDNLQQRITDERKREEIKIKQQLLQTKHNALKDLRSQRRKKALEISHQWYQYKRQADDLLKCLDDIEKKLASLPEPRDERKIKMN

SEQ ID NO: 442 - protein, 1307 aa, Acidaminococcus sp.
MTQFEGFTNLYQVSKTLRFELIPQGKTLKHIQEQGFIEEDKARNDHYKELKPIIDRIYKTYADQCLQLVQLDWENLSAAIDSYRKEKTEETRNALIEEQATYRNAIHDYFIGRTDNLTDAINKRHAEIYKGLFKAELFNGKVLKQLGTVTTTEHENALLRSFDKFTTYFSGFYENRKNVFSAEDISTAIPHRIVQDNFPKFKENCHIFTRLITAVPSLREHFENVKKAIGIFVSTSIEEVFSFPFYNQLLTQTQIDLYNQLLGGISREAGTEKIKGLNEVLNLAIQKNDETAHIIASLPHRFIPLFKQILSDRNTLSFILEEFKSDEEVIQSFCKYKTLLRNENVLETAEALFNELNSIDLTHIFISHKKLETISSALCDHWDTLRNALYERRISELTGKITKSAKEKVQRSLKHEDINLQEIISAAGKELSEAFKQKTSEILSHAHAALDQPLPTTLKKQEEKEILKSQLDSLLGLYHLLDWFAVDESNEVDPEFSARLTGIKLEMEPSLSFYNKARNYATKKPYSVEKFKLNFQMPTLASGWDVNKEKNNGAILFVKNGLYYLGIMPKQKGRYKALSFEPTEKTSEGFDKMYYDYFPDAAKMIPKCSTQLKAVTAHFQTHTTPILLSNNFIEPLEITKEIYDLNNPEKEPKKFQTAYAKKTGDQKGYREALCKWIDFTRDFLSKYTKTTSIDLSSLRPSSQYKDLGEYYAELNPLLYHISFQRIAEKEIMDAVETGKLYLFQIYNKDFAKGHHGKPNLHTLYWTGLFSPENLAKTSIKLNGQAELFYRPKSRMKRMAHRLGEKMLNKKLKDQKTPIPDTLYQELYDYVNHRLSHDLSDEARALLPNVITKEVSHEIIKDRRFTSDKFFFHVPITLNYQAANSPSKFNQRVNAYLKEHPETPIIGIDRGERNLIYITVIDSTGKILEQRSLNTIQQFDYQKKLDNREKERVAARQAWSVVGTIKDLKQGYLSQVIHEIVDLMIHYQAVVVLENLNFGFKSKRTGIAEKAVYQQFEKMLIDKLNCLVLKDYPAEKVGGVLNPYQLTDQFTSFAKMGTQSGFLFYVPAPYTSKIDPLTGFVDPFVWKTIKNHESRKHFLEGFDFLHYDVKTGDFILHFKMNRNLSFQRGLPGFMPAWDIVFEKNETQFDAKGTPFIAGKRIVPVIENHRFTGRYRDLYPANELIALLEEKGIVFRDGSNILPKLLENDDSHAIDTMVALIRSVLQMRNSNAATGEDYINSPVRDLNGVCFDSRFQNPEWPMDADANGAYHIALKGQLLLNHLKESKDLKLQNGISNQDWLAYIQELRN

SEQ ID NO: 443 - protein, 1228 aa, Lachnospiraceae bacterium ND2006
AASKLEKFTNCYSLSKTLRFKAIPVGKTQENIDNKRLLVEDEKRAEDYKGVKKLLDRYYLSFINDVLHSIKLKNLNNYISLFRKKTRTEKENKELENLEINLRKEIAKAFKGAAGYKSLFKKDIIETILPEAADDKDEIALVNSFNGFTTAFTGFFDNRENMFSEEAKSTSIAFRCINENLTRYISNMDIFEKVDAIFDKHEVQEIKEKILNSDYDVEDFFEGEFFNFVLTQEGIDVYNAIIGGFVTESGEKIKGLNEYINLYNAKTKQALPKFKPLYKQVLSDRESLSFYGEGYTSDEEVLEVFRNTLNKNSEIFSSIKKLEKLFKNFDEYSSAGIFVKNGPAISTISKDIFGEWNLIRDKWNAEYDDIHLKKKAVVTEKYEDDRRKSFKKIGSFSLEQLQEYADADLSVVEKLKEIIIQKVDEIYKVYGSSEKLFDADFVLEKSLKKNDAVVAIMKDLLDSVKSFENYIKAFFGEGKETNRDESFYGDFVLAYDILLKVDHIYDAIRNYVTQKPYSKDKFKLYFQNPQFMGGWDKDKETDYRATILRYGSKYYLAIMDKKYAKCLQKIDKDDVNGNYEKINYKLLPGPNKMLPKVFFSKKWMAYYNPSEDIQKIYKNGTFKKGDMFNLNDCHKLIDFFKDSISRYPKWSNAYDFNFSETEKYKDIAGFYREVEEQGYKVSFESASKKEVDKLVEEGKLYMFQIYNKDFSDKSHGTPNLHTMYFKLLFDENNHGQIRLSGGAELFMRRASLKKEELVVHPANSPIANKNPDNPKKTTTLSYDVYKDKRFSEDQYELHIPIAINKCPKNIFKINTEVRVLLKHDDNPYVIGIDRGERNLLYIVVVDGKGNIVEQYSLNEIINNFNGIRIKTDYHSLLDKKEKERFEARQNWTSIENIKELKAGYISQVVHKICELVEKYDAVIALEDLNSGFKNSRVKVEKQVYQKFEKMLIDKLNYMVDKKSNPCATGGALKGYQITNKFESFKSMSTQNGFIFYIPAWLTSKIDPSTGFVNLLKTKYTSIADSKKFISSFDRIMYVPEEDLFEFALDYKNFSRTDADYIKKWKLYSYGNRIRIFAAAKKNNVFAWEEVCLTSAYKELFNKYGINYQQGDIRALLCEQSDKAFYSSFMALMSLMLQMRNSITGRTDVDFLISPVKNSDGIFYDSRNYEAQENAILPKNADANGAYNIARKVLWAIGQFKKAEDEKLDKVKIAISNKEWLEYAQTSVK

SEQ ID NO: 444 - protein, 18 aa, Thosea asigna virus
EGRGSLLTCGDVEENPGP

SEQ ID NO: 445 - protein, 20 aa, Equine rhinitis A virus
QCTNYALLKLAGDVESNPGP

SEQ ID NO: 446 - protein, 19 aa, Porcine teschovirus-1
ATNFSLLKQAGDVEENPGP

SEQ ID NO: 447 - protein, 23 aa, Foot and mouth disease virus
PVKQLLNFDLLKLAGDVESNPGP

SEQ ID NO: 448 - RNA, 24 nt, Artificial Sequence
  source: /note="Description of Artificial Sequence: Synthetic oligonucleotide"
aaaaaggaaaaaagaagaaaaaga

SEQ ID NO: 449 - RNA, 24 nt, Artificial Sequence
  source: /note="Description of Artificial Sequence: Synthetic oligonucleotide"
caaaaaggaaaaaagaagaaaaag

SEQ ID NO: 450 - RNA, 24 nt, Artificial Sequence
  source: /note="Description of Artificial Sequence: Synthetic oligonucleotide"
gcaaaaaggaaaaaagaagaaaaa

SEQ ID NO: 451 - RNA, 24 nt, Artificial Sequence
  source: /note="Description of Artificial Sequence: Synthetic oligonucleotide"
uuuugcaaaaaggaaaaaagaaga

SEQ ID NO: 452 - RNA, 24 nt, Artificial Sequence
  source: /note="Description of Artificial Sequence: Synthetic oligonucleotide"
uuuuugcaaaaaggaaaaaagaag

SEQ ID NO: 453 - RNA, 24 nt, Artificial Sequence
  source: /note="Description of Artificial Sequence: Synthetic oligonucleotide"
guuuuugcaaaaaggaaaaaagaa

SEQ ID NO: 454 - RNA, 24 nt, Artificial Sequence
  source: /note="Description of Artificial Sequence: Synthetic oligonucleotide"
auuuuggguuuuugcaaaaaggaa

SEQ ID NO: 455 - RNA, 24 nt, Artificial Sequence
  source: /note="Description of Artificial Sequence: Synthetic oligonucleotide"
uauuuuggguuuuugcaaaaagga

SEQ ID NO: 456 - RNA, 24 nt, Artificial Sequence
  source: /note="Description of Artificial Sequence: Synthetic oligonucleotide"
auauuuuggguuuuugcaaaaagg

SEQ ID NO: 457 - RNA, 24 nt, Artificial Sequence
  source: /note="Description of Artificial Sequence: Synthetic oligonucleotide"
aauauuuuggguuuuugcaaaaag

SEQ ID NO: 458 - RNA, 24 nt, Artificial Sequence
  source: /note="Description of Artificial Sequence: Synthetic oligonucleotide"
gcuaaaauauuuuggguuuuugca

SEQ ID NO: 459 - RNA, 24 nt, Artificial Sequence
  source: /note="Description of Artificial Sequence: Synthetic oligonucleotide"
agcuaaaauauuuuggguuuuugc

SEQ ID NO: 460 - RNA, 24 nt, Artificial Sequence
  source: /note="Description of Artificial Sequence: Synthetic oligonucleotide"
gagcuaaaauauuuuggguuuuug

SEQ ID NO: 461 - RNA, 24 nt, Artificial Sequence
  source: /note="Description of Artificial Sequence: Synthetic oligonucleotide"
agaguaacagucugaguaggagcu

SEQ ID NO: 462 - RNA, 24 nt, Artificial Sequence
  source: /note="Description of Artificial Sequence: Synthetic oligonucleotide"
cagaguaacagucugaguaggagc

SEQ ID NO: 463 - RNA, 24 nt, Artificial Sequence
  source: /note="Description of Artificial Sequence: Synthetic oligonucleotide"
gugacacaaccugugguuacuaag

SEQ ID NO: 464 - RNA, 23 nt, Artificial Sequence
  source: /note="Description of Artificial Sequence: Synthetic oligonucleotide"
gguuacuaaggaaacugccaucu

SEQ ID NO: 465 - RNA, 24 nt, Artificial Sequence
  source: /note="Description of Artificial Sequence: Synthetic oligonucleotide"
aaggaaacugccaucuccaaacua

SEQ ID NO: 466 - RNA, 24 nt, Artificial Sequence
  source: /note="Description of Artificial Sequence: Synthetic oligonucleotide"
aucaucaagcagaagguaugagaa

SEQ ID NO: 467 - RNA, 24 nt, Artificial Sequence
  source: /note="Description of Artificial Sequence: Synthetic oligonucleotide"
agcagaagguaugagaaaaaauga

SEQ ID NO: 468 - RNA, 24 nt, Artificial Sequence
  source: /note="Description of Artificial Sequence: Synthetic oligonucleotide"
gcagaagguaugagaaaaaaugau

SEQ ID NO: 469 - RNA, 24 nt, Artificial Sequence
  source: /note="Description of Artificial Sequence: Synthetic oligonucleotide"
uaaaaguuggcagaaguuuuucuu

SEQ ID NO: 470 - RNA, 24 nt, Artificial Sequence
  source: /note="Description of Artificial Sequence: Synthetic oligonucleotide"
aaaaguuggcagaaguuuuucuuu

SEQ ID NO: 471 - RNA, 24 nt, Artificial Sequence
  source: /note="Description of Artificial Sequence: Synthetic oligonucleotide"
gguggaaaaucuucauuuuaaaga

SEQ ID NO: 472 - RNA, 24 nt, Artificial Sequence
  source: /note="Description of Artificial Sequence: Synthetic oligonucleotide"
ugguggaaaaucuucauuuuaaag

SEQ ID NO: 473 - RNA, 24 nt, Artificial Sequence
  source: /note="Description of Artificial Sequence: Synthetic oligonucleotide"
uugguggaaaaucuucauuuuaaa

SEQ ID NO: 474 - RNA, 24 nt, Artificial Sequence
  source: /note="Description of Artificial Sequence: Synthetic oligonucleotide"
gugauugguggaaaaucuucauuu

SEQ ID NO: 475 - RNA, 24 nt, Artificial Sequence
  source: /note="Description of Artificial Sequence: Synthetic oligonucleotide"
cuaggagaguaaagugauuggugg

SEQ ID NO: 476 - RNA, 24 nt, Artificial Sequence
  source: /note="Description of Artificial Sequence: Synthetic oligonucleotide"
ucuaggagaguaaagugauuggug

SEQ ID NO: 477 - RNA, 23 nt, Artificial Sequence
  source: /note="Description of Artificial Sequence: Synthetic oligonucleotide"
cuggugggaaauggucuaggaga

SEQ ID NO: 478 - RNA, 24 nt, Artificial Sequence
  source: /note="Description of Artificial Sequence: Synthetic oligonucleotide"
guagcacacuguuuaaucuuuucu

SEQ ID NO: 479 - RNA, 24 nt, Artificial Sequence
  source: /note="Description of Artificial Sequence: Synthetic oligonucleotide"
cacacuguuuaaucuuuucucaaa

SEQ ID NO: 480 - RNA, 24 nt, Artificial Sequence
  source: /note="Description of Artificial Sequence: Synthetic oligonucleotide"
acacuguuuaaucuuuucucaaau

SEQ ID NO: 481 - RNA, 24 nt, Artificial Sequence
  source: /note="Description of Artificial Sequence: Synthetic oligonucleotide"
cacuguuuaaucuuuucucaaaua

SEQ ID NO: 482 - RNA, 24 nt, Artificial Sequence
  source: /note="Description of Artificial Sequence: Synthetic oligonucleotide"
augucuuuuuauuugagaaaagau

SEQ ID NO: 483 - RNA, 24 nt, Artificial Sequence
  source: /note="Description of Artificial Sequence: Synthetic oligonucleotide"
aagccccaugucuuuuuauuugag

SEQ ID NO: 484 - RNA, 24 nt, Artificial Sequence
  source: /note="Description of Artificial Sequence: Synthetic oligonucleotide"
gaagccccaugucuuuuuauuuga

SEQ ID NO: 485 - RNA, 24 nt, Artificial Sequence
  source: /note="Description of Artificial Sequence: Synthetic oligonucleotide"
guaagauaccaaaaaggcaaaaca

SEQ ID NO: 486 - RNA, 24 nt, Artificial Sequence
  source: /note="Description of Artificial Sequence: Synthetic oligonucleotide"
uguaagauaccaaaaaggcaaaac

SEQ ID NO: 487 - RNA, 24 nt, Artificial Sequence
  source: /note="Description of Artificial Sequence: Synthetic oligonucleotide"
cuguaagauaccaaaaaggcaaaa

SEQ ID NO: 488 - RNA, 24 nt, Artificial Sequence
  source: /note="Description of Artificial Sequence: Synthetic oligonucleotide"
guuccuguaagauaccaaaaaggc

SEQ ID NO: 489 - RNA, 24 nt, Artificial Sequence
  source: /note="Description of Artificial Sequence: Synthetic oligonucleotide"
aguuccuguaagauaccaaaaagg

SEQ ID NO: 490 - RNA, 24 nt, Artificial Sequence
  source: /note="Description of Artificial Sequence: Synthetic oligonucleotide"
uccuggaguuccuguaagauacca

SEQ ID NO: 491 - RNA, 24 nt, Artificial Sequence
  source: /note="Description of Artificial Sequence: Synthetic oligonucleotide"
auccuggaguuccuguaagauacc

SEQ ID NO: 492 - RNA, 24 nt, Artificial Sequence
  source: /note="Description of Artificial Sequence: Synthetic oligonucleotide"
gggaagaaauaauucagcaauccu

SEQ ID NO: 493 - RNA, 24 nt, Artificial Sequence
  source: /note="Description of Artificial Sequence: Synthetic oligonucleotide"
ggaagaaauaauucagcaauccuc

SEQ ID NO: 494 - RNA, 24 nt, Artificial Sequence
  source: /note="Description of Artificial Sequence: Synthetic oligonucleotide"
gaagaaauaauucagcaauccuca

SEQ ID NO: 495 - RNA, 24 nt, Artificial Sequence
  source: /note="Description of Artificial Sequence: Synthetic oligonucleotide"
aaaacagaugccaguauucuacag

SEQ ID NO: 496 - RNA, 24 nt, Artificial Sequence
  source: /note="Description of Artificial Sequence: Synthetic oligonucleotide"
aaacagaugccaguauucuacagg

SEQ ID NO: 497 - RNA, 24 nt, Artificial Sequence
  source: /note="Description of Artificial Sequence: Synthetic oligonucleotide"
aacagaugccaguauucuacagga

SEQ ID NO: 498 - RNA, 24 nt, Artificial Sequence
  source: /note="Description of Artificial Sequence: Synthetic oligonucleotide"
gaaucugcgguggcaggaggucug

SEQ ID NO: 499 - RNA, 24 nt, Artificial Sequence
  source: /note="Description of Artificial Sequence: Synthetic oligonucleotide"
aggucugcaaacagcugucagaca

SEQ ID NO: 500 - RNA, 24 nt, Artificial Sequence
  source: /note="Description of Artificial Sequence: Synthetic oligonucleotide"
ggucugcaaacagcugucagacag

SEQ ID NO: 501 - RNA, 24 nt, Artificial Sequence
  source: /note="Description of Artificial Sequence: Synthetic oligonucleotide"
gucugcaaacagcugucagacaga

SEQ ID NO: 502 - RNA, 24 nt, Artificial Sequence
  source: /note="Description of Artificial Sequence: Synthetic oligonucleotide"
ucugcaaacagcugucagacagaa

SEQ ID NO: 503 - RNA, 24 nt, Artificial Sequence
  source: /note="Description of Artificial Sequence: Synthetic oligonucleotide"
uagggcgacagaucuaauaggaau

SEQ ID NO: 504 - RNA, 24 nt, Artificial Sequence
  source: /note="Description of Artificial Sequence: Synthetic oligonucleotide"
agggcgacagaucuaauaggaaug

SEQ ID NO: 505 - RNA, 24 nt, Artificial Sequence
  source: /note="Description of Artificial Sequence: Synthetic oligonucleotide"
uaaagaaagcuuaaaaagucugcu

SEQ ID NO: 506 - RNA, 24 nt, Artificial Sequence
  source: /note="Description of Artificial Sequence: Synthetic oligonucleotide"
cuaaagaaagcuuaaaaagucugc

SEQ ID NO: 507 - RNA, 24 nt, Artificial Sequence
  source: /note="Description of Artificial Sequence: Synthetic oligonucleotide"
aaauauucuucuaaagaaagcuua

SEQ ID NO: 508 - RNA, 24 nt, Artificial Sequence
  source: /note="Description of Artificial Sequence: Synthetic oligonucleotide"
gaaauauucuucuaaagaaagcuu

SEQ ID NO: 509 - RNA, 24 nt, Artificial Sequence
  source: /note="Description of Artificial Sequence: Synthetic oligonucleotide"
ugaaauauucuucuaaagaaagcu

SEQ ID NO: 510 - RNA, 24 nt, Artificial Sequence
  source: /note="Description of Artificial Sequence: Synthetic oligonucleotide"
ucucucaugaaauauucuucuaaa

SEQ ID NO: 511 - RNA, 24 nt, Artificial Sequence
  source: /note="Description of Artificial Sequence: Synthetic oligonucleotide"
auaaucucucaugaaauauucuuc

SEQ ID NO: 512 - RNA, 24 nt, Artificial Sequence
  source: /note="Description of Artificial Sequence: Synthetic oligonucleotide"
gcguauauuuuuugguuauacuga

SEQ ID NO: 513 - RNA, 24 nt, Artificial Sequence
  source: /note="Description of Artificial Sequence: Synthetic oligonucleotide"
ucaagaaaaauagauggauuaugu

SEQ ID NO: 514 - RNA, 24 nt, Artificial Sequence
  source: /note="Description of Artificial Sequence: Synthetic oligonucleotide"
aucaagaaaaauagauggauuaug

SEQ ID NO: 515 - RNA, 24 nt, Artificial Sequence
  source: /note="Description of Artificial Sequence: Synthetic oligonucleotide"
cagguaaaagcauauggaucaaga

SEQ ID NO: 516 - RNA, 24 nt, Artificial Sequence
  source: /note="Description of Artificial Sequence: Synthetic oligonucleotide"
gcagguaaaagcauauggaucaag

SEQ ID NO: 517 - RNA, 24 nt, Artificial Sequence
  source: /note="Description of Artificial Sequence: Synthetic oligonucleotide"
ugcagguaaaagcauauggaucaa

SEQ ID NO: 518 - RNA, 24 nt, Artificial Sequence
  source: /note="Description of Artificial Sequence: Synthetic oligonucleotide"
caggcgauuugacagaucuguuga

SEQ ID NO: 519 - RNA, 24 nt, Artificial Sequence
  source: /note="Description of Artificial Sequence: Synthetic oligonucleotide"
agaucugucaaaucgccugcaggu

SEQ ID NO: 520 - RNA, 24 nt, Artificial Sequence
  source: /note="Description of Artificial Sequence: Synthetic oligonucleotide"
cagaucugucaaaucgccugcagg

SEQ ID NO: 521 - RNA, 24 nt, Artificial Sequence
  source: /note="Description of Artificial Sequence: Synthetic oligonucleotide"
gccgccauuucucaacagaucugu

SEQ ID NO: 522 - RNA, 24 nt, Artificial Sequence
  source: /note="Description of Artificial Sequence: Synthetic oligonucleotide"
aauggcggcguuuucauuaugaua

SEQ ID NO: 523 - RNA, 24 nt, Artificial Sequence
  source: /note="Description of Artificial Sequence: Synthetic oligonucleotide"
auuaaauaucuuuauaucauaaug

SEQ ID NO: 524 - RNA, 24 nt, Artificial Sequence
  source: /note="Description of Artificial Sequence: Synthetic oligonucleotide"
ugagaauugggaacaugcuaaaua

SEQ ID NO: 525 - RNA, 24 nt, Artificial Sequence
  source: /note="Description of Artificial Sequence: Synthetic oligonucleotide"
gguaagucuuugauuuguuuuuuc

SEQ ID NO: 526 - RNA, 24 nt, Artificial Sequence
  source: /note="Description of Artificial Sequence: Synthetic oligonucleotide"
aaauacaauuucgaaaaaacaaau

SEQ ID NO: 527 - RNA, 24 nt, Artificial Sequence
  source: /note="Description of Artificial Sequence: Synthetic oligonucleotide"
aagauaaauacaauuucgaaaaaa

SEQ ID NO: 528 - RNA, 24 nt, Artificial Sequence
  source: /note="Description of Artificial Sequence: Synthetic oligonucleotide"
gcugaagauaaauacaauuucgaa

SEQ ID NO: 529 - RNA, 24 nt, Artificial Sequence
  source: /note="Description of Artificial Sequence: Synthetic oligonucleotide"
ugcugaagauaaauacaauuucga

SEQ ID NO: 530 - RNA, 24 nt, Artificial Sequence
  source: /note="Description of Artificial Sequence: Synthetic oligonucleotide"
gugcugaagauaaauacaauuucg

SEQ ID NO: 531 - RNA, 24 nt, Artificial Sequence
  source: /note="Description of Artificial Sequence: Synthetic oligonucleotide"
ugugcugaagauaaauacaauuuc

SEQ ID NO: 532 - RNA, 24 nt, Artificial Sequence
  source: /note="Description of Artificial Sequence: Synthetic oligonucleotide"
gcacaucuggacucuuuaacuucu

SEQ ID NO: 533 - RNA, 24 nt, Artificial Sequence
  source: /note="Description of Artificial Sequence: Synthetic oligonucleotide"
uaaagaguccagaugugcugaaga

SEQ ID NO: 534 - RNA, 24 nt, Artificial Sequence
  source: /note="Description of Artificial Sequence: Synthetic oligonucleotide"
aagaucagguucugaagggugaug

SEQ ID NO: 535 - RNA, 24 nt, Artificial Sequence
  source: /note="Description of Artificial Sequence: Synthetic oligonucleotide"
uucagaaccugaucuuuaagaagu

SEQ ID NO: 536 - RNA, 24 nt, Artificial Sequence
  source: /note="Description of Artificial Sequence: Synthetic oligonucleotide"
aauauaaugaugacaacaacaguc

SEQ ID NO: 537 - RNA, 24 nt, Artificial Sequence
  source: /note="Description of Artificial Sequence: Synthetic oligonucleotide"
uaauauaaugaugacaacaacagu

SEQ ID NO: 538 - RNA, 24 nt, Artificial Sequence
  source: /note="Description of Artificial Sequence: Synthetic oligonucleotide"
uuuauuuuuccuuuuauucuaguu

SEQ ID NO: 539 - RNA, 24 nt, Artificial Sequence
  source: /note="Description of Artificial Sequence: Synthetic oligonucleotide"
aaaggaaaaauaaauauauaguag

SEQ ID NO: 540 - RNA, 24 nt, Artificial Sequence
  source: /note="Description of Artificial Sequence: Synthetic oligonucleotide"
uuucaacuagaauaaaaggaaaaa

SEQ ID NO: 541 - RNA, 24 nt, Artificial Sequence
  source: /note="Description of Artificial Sequence: Synthetic oligonucleotide"
auucuuucaacuagaauaaaagga

SEQ ID NO: 542 - RNA, 24 nt, Artificial Sequence
  source: /note="Description of Artificial Sequence: Synthetic oligonucleotide"
aauucuuucaacuagaauaaaagg

SEQ ID NO: 543 - RNA, 24 nt, Artificial Sequence
  source: /note="Description of Artificial Sequence: Synthetic oligonucleotide"
gaauucuuucaacuagaauaaaag

SEQ ID NO: 544 - RNA, 24 nt, Artificial Sequence
  source: /note="Description of Artificial Sequence: Synthetic oligonucleotide"
auucugaauucuuucaacuagaau

SEQ ID NO: 545 - RNA, 24 nt, Artificial Sequence
  source: /note="Description of Artificial Sequence: Synthetic oligonucleotide"
gauucugaauucuuucaacuagaa

SEQ ID NO: 546 - RNA, 24 nt, Artificial Sequence
  source: /note="Description of Artificial Sequence: Synthetic oligonucleotide"
cagaaccggaggcaacaguugaau

SEQ ID NO: 547 - RNA, 24 nt, Artificial Sequence
  source: /note="Description of Artificial Sequence: Synthetic oligonucleotide"
ggaggcaacaguugaaugaaaugu

SEQ ID NO: 548 - RNA, 24 nt, Artificial Sequence
  source: /note="Description of Artificial Sequence: Synthetic oligonucleotide"
uauacaguagaugcaauccaaaag

SEQ ID NO: 549 - RNA, 24 nt, Artificial Sequence
  source: /note="Description of Artificial Sequence: Synthetic oligonucleotide"
gaugcaauccaaaagaaaaucaca

SEQ ID NO: 550 - RNA, 24 nt, Artificial Sequence
  source: /note="Description of Artificial Sequence: Synthetic oligonucleotide"
aaucacagaaaccaagguuaguau

SEQ ID NO: 551 - RNA, 23 nt, Artificial Sequence
  source: /note="Description of Artificial Sequence: Synthetic oligonucleotide"
agguuaguaucaaagauaccuuu

SEQ ID NO: 552 - RNA, 24 nt, Artificial Sequence
  source: /note="Description of Artificial Sequence: Synthetic oligonucleotide"
gguuaguaucaaagauaccuuuuu

SEQ ID NO: 553 - RNA, 24 nt, Artificial Sequence
  source: /note="Description of Artificial Sequence: Synthetic oligonucleotide"
aguaucaaagauaccuuuuuaaaa

SEQ ID NO: 554 - RNA, 24 nt, Artificial Sequence
  source: /note="Description of Artificial Sequence: Synthetic oligonucleotide"
guaucaaagauaccuuuuuaaaau

SEQ ID NO: 555 - RNA, 24 nt, Artificial Sequence
  source: /note="Description of Artificial Sequence: Synthetic oligonucleotide"
uguuugugucccaguuugcauuaa

SEQ ID NO: 556 - RNA, 24 nt, Artificial Sequence
  source: /note="Description of Artificial Sequence: Synthetic oligonucleotide"
cugggacacaaacauggcaauuua

SEQ ID NO: 557 - RNA, 24 nt, Artificial Sequence
  source: /note="Description of Artificial Sequence: Synthetic oligonucleotide"
acugggacacaaacauggcaauuu

SEQ ID NO: 558 - RNA, 24 nt, Artificial Sequence
  source: /note="Description of Artificial Sequence: Synthetic oligonucleotide"
aacugggacacaaacauggcaauu

SEQ ID NO: 559 - RNA, 24 nt, Artificial Sequence
  source: /note="Description of Artificial Sequence: Synthetic oligonucleotide"
uauuuguuaaugcaaacugggaca

SEQ ID NO: 560 - RNA, 24 nt, Artificial Sequence
  source: /note="Description of Artificial Sequence: Synthetic oligonucleotide"
acaaauaguuugagaacuauguug

SEQ ID NO: 561 - RNA, 24 nt, Artificial Sequence
  source: /note="Description of Artificial Sequence: Synthetic oligonucleotide"
caaauaguuugagaacuauguugg

SEQ ID NO: 562 - RNA, 24 nt, Artificial Sequence
  source: /note="Description of Artificial Sequence: Synthetic oligonucleotide"
aaauaguuugagaacuauguugga

SEQ ID NO: 563 - RNA, 24 nt, Artificial Sequence
  source: /note="Description of Artificial Sequence: Synthetic oligonucleotide"
auaguuugagaacuauguuggaaa

SEQ ID NO: 564 - RNA, 24 nt, Artificial Sequence
  source: /note="Description of Artificial Sequence: Synthetic oligonucleotide"
uaguuugagaacuauguuggaaaa

SEQ ID NO: 565 - RNA, 24 nt, Artificial Sequence
  source: /note="Description of Artificial Sequence: Synthetic oligonucleotide"
aguuugagaacuauguuggaaaaa

SEQ ID NO: 566 - RNA, 24 nt, Artificial Sequence
  source: /note="Description of Artificial Sequence: Synthetic oligonucleotide"
uaguucucaaacuauuuguuaaug

SEQ ID NO: 567 - RNA, 24 nt, Artificial Sequence
  source: /note="Description of Artificial Sequence: Synthetic oligonucleotide"
uauuuuuuuuuccaacauaguucu

SEQ ID NO: 568 - RNA, 24 nt, Artificial Sequence
  source: /note="Description of Artificial Sequence: Synthetic oligonucleotide"
cuucuuucuccaggcuagaagaac

SEQ ID NO: 569 - RNA, 24 nt, Artificial Sequence
  source: /note="Description of Artificial Sequence: Synthetic oligonucleotide"
cuucuagccuggagaaagaagaau

SEQ ID NO: 570 - RNA, 24 nt, Artificial Sequence
  source: /note="Description of Artificial Sequence: Synthetic oligonucleotide"
ucuucuagccuggagaaagaagaa

SEQ ID NO: 571 - RNA, 24 nt, Artificial Sequence
  source: /note="Description of Artificial Sequence: Synthetic oligonucleotide"
auucuuuuguucuucuagccugga

SEQ ID NO: 572 - RNA, 24 nt, Artificial Sequence
  source: /note="Description of Artificial Sequence: Synthetic oligonucleotide"
caaaagaauaucuugucagaauuu

SEQ ID NO: 573 - RNA, 24 nt, Artificial Sequence
  source: /note="Description of Artificial Sequence: Synthetic oligonucleotide"
cuggaaaagagcagcaacuaaaag

SEQ ID NO: 574 - RNA, 24 nt, Artificial Sequence
  source: /note="Description of Artificial Sequence: Synthetic oligonucleotide"
caagucaagguaauuuuauuuucu

SEQ ID NO: 575 - RNA, 24 nt, Artificial Sequence
  source: /note="Description of Artificial Sequence: Synthetic oligonucleotide"
caaaucccccagggccugcuugca

SEQ ID NO: 576 - RNA, 24 nt, Artificial Sequence
  source: /note="Description of Artificial Sequence: Synthetic oligonucleotide"
aggcccugggggauuugagaaaau

SEQ ID NO: 577 - RNA, 24 nt, Artificial Sequence
  source: /note="Description of Artificial Sequence: Synthetic oligonucleotide"
caggcccugggggauuugagaaaa

SEQ ID NO: 578 - RNA, 24 nt, Artificial Sequence
  source: /note="Description of Artificial Sequence: Synthetic oligonucleotide"
caagcaggcccugggggauuugag

SEQ ID NO: 579 - RNA, 24 nt, Artificial Sequence
  source: /note="Description of Artificial Sequence: Synthetic oligonucleotide"
gcaagcaggcccugggggauuuga

SEQ ID NO: 580 - RNA, 24 nt, Artificial Sequence
  source: /note="Description of Artificial Sequence: Synthetic oligonucleotide"
gcagaaaaccaaugauugaauuaa

SEQ ID NO: 581 - RNA, 24 nt, Artificial Sequence
  source: /note="Description of Artificial Sequence: Synthetic oligonucleotide"
ggcagaaaaccaaugauugaauua

SEQ ID NO: 582 - RNA, 24 nt, Artificial Sequence
  source: /note="Description of Artificial Sequence: Synthetic oligonucleotide"
gggcagaaaaccaaugauugaauu

SEQ ID NO: 583 - RNA, 24 nt, Artificial Sequence
  source: /note="Description of Artificial Sequence: Synthetic oligonucleotide"
ugggcagaaaaccaaugauugaau

SEQ ID NO: 584 - RNA, 24 nt, Artificial Sequence
  source: /note="Description of Artificial Sequence: Synthetic oligonucleotide"
auuagguuauucauaguuccuugc

SEQ ID NO: 585 - RNA, 24 nt, Artificial Sequence
  source: /note="Description of Artificial Sequence: Synthetic oligonucleotide"
aacuaugaauaaccuaaugggcag

SEQ ID NO: 586 - RNA, 24 nt, Artificial Sequence
  source: /note="Description of Artificial Sequence: Synthetic oligonucleotide"
gaacuaugaauaaccuaaugggca

SEQ ID NO: 587 - RNA, 24 nt, Artificial Sequence
  source: /note="Description of Artificial Sequence: Synthetic oligonucleotide"
uauuuccuguuaaauuguuuucua

SEQ ID NO: 588 - RNA, 24 nt, Artificial Sequence
  source: /note="Description of Artificial Sequence: Synthetic oligonucleotide"
gguuuauagaaaacaauuuaacag

SEQ ID NO: 589 - RNA, 24 nt, Artificial Sequence
  source: /note="Description of Artificial Sequence: Synthetic oligonucleotide"
auacaguaacaucuuuuuuauuuc

SEQ ID NO: 590 - RNA, 24 nt, Artificial Sequence
  source: /note="Description of Artificial Sequence: Synthetic oligonucleotide"
uacaguaacaucuuuuuuauuucu

SEQ ID NO: 591 - RNA, 24 nt, Artificial Sequence
  source: /note="Description of Artificial Sequence: Synthetic oligonucleotide"
auguuacuguauaaggguuuauag

SEQ ID NO: 592 - RNA, 24 nt, Artificial Sequence
  source: /note="Description of Artificial Sequence: Synthetic oligonucleotide"
gauguuacuguauaaggguuuaua

SEQ ID NO: 593 - RNA, 24 nt, Artificial Sequence
  source: /note="Description of Artificial Sequence: Synthetic oligonucleotide"
cagccaaaacacuuuuagaaauaa

SEQ ID NO: 594 - RNA, 24 nt, Artificial Sequence
  source: /note="Description of Artificial Sequence: Synthetic oligonucleotide"
ccagccaaaacacuuuuagaaaua

SEQ ID NO: 595 - RNA, 24 nt, Artificial Sequence
  source: /note="Description of Artificial Sequence: Synthetic oligonucleotide"
accagccaaaacacuuuuagaaau

SEQ ID NO: 596 - RNA, 24 nt, Artificial Sequence
  source: /note="Description of Artificial Sequence: Synthetic oligonucleotide"
gaccagccaaaacacuuuuagaaa

SEQ ID NO: 597 - RNA, 24 nt, Artificial Sequence
  source: /note="Description of Artificial Sequence: Synthetic oligonucleotide"
gugagaccagccaaaacacuuuua

SEQ ID NO: 598 - RNA, 24 nt, Artificial Sequence
  source: /note="Description of Artificial Sequence: Synthetic oligonucleotide"
aauuguacuuuacuuuguauuaug

SEQ ID NO: 599 - RNA, 24 nt, Artificial Sequence
  source: /note="Description of Artificial Sequence: Synthetic oligonucleotide"
auuguacuuuacuuuguauuaugu

SEQ ID NO: 600 - RNA, 24 nt, Artificial Sequence
  source: /note="Description of Artificial Sequence: Synthetic oligonucleotide"
uaaaguacaauugugagaccagcc

SEQ ID NO: 601 - RNA, 24 nt, Artificial Sequence
  source: /note="Description of Artificial Sequence: Synthetic oligonucleotide"
guaaaguacaauugugagaccagc

SEQ ID NO: 602 - RNA, 24 nt, Artificial Sequence
  source: /note="Description of Artificial Sequence: Synthetic oligonucleotide"
guauuccuuuuacauaauacaaag

SEQ ID NO: 603 - RNA, 24 nt, Artificial Sequence
  source: /note="Description of Artificial Sequence: Synthetic oligonucleotide"
guuguguauuccuuuuacauaaua

SEQ ID NO: 604 - RNA, 24 nt, Artificial Sequence
  source: /note="Description of Artificial Sequence: Synthetic oligonucleotide"
auccugcauuguugccuguaagaa

SEQ ID NO: 605 - RNA, 24 nt, Artificial Sequence
  source: /note="Description of Artificial Sequence: Synthetic oligonucleotide"
uuccaacuggggacgccucuguuc

SEQ ID NO: 606 - RNA, 24 nt, Artificial Sequence
  source: /note="Description of Artificial Sequence: Synthetic oligonucleotide"
uuggaagaacucauuaccgcugcc

SEQ ID NO: 607 - RNA, 24 nt, Artificial Sequence
  source: /note="Description of Artificial Sequence: Synthetic oligonucleotide"
ucauuaccgcugcccaaaauuuga

SEQ ID NO: 608 - RNA, 24 nt, Artificial Sequence
  source: /note="Description of Artificial Sequence: Synthetic oligonucleotide"
cucuugauugcuggucuuguuuuu

SEQ ID NO: 609 - RNA, 24 nt, Artificial Sequence
  source: /note="Description of Artificial Sequence: Synthetic oligonucleotide"
guuuuuuaacaagcaugggacaca

SEQ ID NO: 610 - RNA, 24 nt, Artificial Sequence
  source: /note="Description of Artificial Sequence: Synthetic oligonucleotide"
cuuugugugucccaugcuuguuaa

SEQ ID NO: 611 - RNA, 24 nt, Artificial Sequence
  source: /note="Description of Artificial Sequence: Synthetic oligonucleotide"
gcuuugugugucccaugcuuguua

SEQ ID NO: 612 - RNA, 24 nt, Artificial Sequence
  source: /note="Description of Artificial Sequence: Synthetic oligonucleotide"
ugcuuugugugucccaugcuuguu

SEQ ID NO: 613 - RNA, 24 nt, Artificial Sequence
  source: /note="Description of Artificial Sequence: Synthetic oligonucleotide"
uugcuuugugugucccaugcuugu

SEQ ID NO: 614 - RNA, 24 nt, Artificial Sequence
  source: /note="Description of Artificial Sequence: Synthetic oligonucleotide"
agcaagaugcaugacaaguuucaa

SEQ ID NO: 615 - RNA, 24 nt, Artificial Sequence
  source: /note="Description of Artificial Sequence: Synthetic oligonucleotide"
gcaagaugcaugacaaguuucaau

SEQ ID NO: 616 - RNA, 24 nt, Artificial Sequence
  source: /note="Description of Artificial Sequence: Synthetic oligonucleotide"
caagaugcaugacaaguuucaaua

SEQ ID NO: 617 - RNA, 24 nt, Artificial Sequence
  source: /note="Description of Artificial Sequence: Synthetic oligonucleotide"
gauauaugaacuuaaguuuuuauu

SEQ ID NO: 618 - RNA, 24 nt, Artificial Sequence
  source: /note="Description of Artificial Sequence: Synthetic oligonucleotide"
auagaaauccaauaauauauucac

SEQ ID NO: 619 - RNA, 24 nt, Artificial Sequence
  source: /note="Description of Artificial Sequence: Synthetic oligonucleotide"
auuaagauguucaugaauuaucuu

SEQ ID NO: 620 - RNA, 24 nt, Artificial Sequence
  source: /note="Description of Artificial Sequence: Synthetic oligonucleotide"
uaaguaauguguaugcuuuucugu

SEQ ID NO: 621 - RNA, 24 nt, Artificial Sequence
  source: /note="Description of Artificial Sequence: Synthetic oligonucleotide"
aucuucuaacuuccucuuuaacag

SEQ ID NO: 622 - RNA, 24 nt, Artificial Sequence
  source: /note="Description of Artificial Sequence: Synthetic oligonucleotide"
gaucuucuaacuuccucuuuaaca

SEQ ID NO: 623 - RNA, 24 nt, Artificial Sequence
  source: /note="Description of Artificial Sequence: Synthetic oligonucleotide"
aucugagcucugaguggaaggcgg

SEQ ID NO: 624 - RNA, 24 nt, Artificial Sequence
  source: /note="Description of Artificial Sequence: Synthetic oligonucleotide"
accguuuacuucaagagcugaggg

SEQ ID NO: 625 - RNA, 24 nt, Artificial Sequence
  source: /note="Description of Artificial Sequence: Synthetic oligonucleotide"
cugcuuugcccucagcucuugaag

SEQ ID NO: 626 - RNA, 24 nt, Artificial Sequence
  source: /note="Description of Artificial Sequence: Synthetic oligonucleotide"
ucucuuuggcucuagcuauuuguu

SEQ ID NO: 627 - RNA, 24 nt, Artificial Sequence
  source: /note="Description of Artificial Sequence: Synthetic oligonucleotide"
cucuuuggcucuagcuauuuguuc

SEQ ID NO: 628 - RNA, 24 nt, Artificial Sequence
  source: /note="Description of Artificial Sequence: Synthetic oligonucleotide"
cacuuuugaacaaauagcuagagc

SEQ ID NO: 629 - RNA, 24 nt, Artificial Sequence
  source: /note="Description of Artificial Sequence: Synthetic oligonucleotide"
ucacuucauaguugcacuuuugaa

SEQ ID NO: 630 - RNA, 24 nt, Artificial Sequence
  source: /note="Description of Artificial Sequence: Synthetic oligonucleotide"
augaagugaugacugggugagaga

SEQ ID NO: 631 - RNA, 24 nt, Artificial Sequence
  source: /note="Description of Artificial Sequence: Synthetic oligonucleotide"
ugaagugaugacugggugagagag

SEQ ID NO: 632 - RNA, 24 nt, Artificial Sequence
  source: /note="Description of Artificial Sequence: Synthetic oligonucleotide"
aagagaaaaauauauauauauaua

SEQ ID NO: 633 - RNA, 24 nt, Artificial Sequence
  source: /note="Description of Artificial Sequence: Synthetic oligonucleotide"
gaauuagcugucuauagaaagaga

SEQ ID NO: 634 - RNA, 24 nt, Artificial Sequence
  source: /note="Description of Artificial Sequence: Synthetic oligonucleotide"
ugaauuagcugucuauagaaagag

SEQ ID NO: 635 - RNA, 24 nt, Artificial Sequence
  source: /note="Description of Artificial Sequence: Synthetic oligonucleotide"
agcuaauucauuuuuuuacuguuu

SEQ ID NO: 636 - RNA, 24 nt, Artificial Sequence
  source: /note="Description of Artificial Sequence: Synthetic oligonucleotide"
augaauuagcugucuauagaaaga

SEQ ID NO: 637 - RNA, 24 nt, Artificial Sequence
  source: /note="Description of Artificial Sequence: Synthetic oligonucleotide"
gcuaauucauuuuuuuacuguuuu

SEQ ID NO: 638 - RNA, 24 nt, Artificial Sequence
  source: /note="Description of Artificial Sequence: Synthetic oligonucleotide"
aaaaaaaugaauuagcugucuaua

SEQ ID NO: 639 - RNA, 24 nt, Artificial Sequence
  source: /note="Description of Artificial Sequence: Synthetic oligonucleotide"
uuaaaauuuuuauauuacagaaua

SEQ ID NO: 640 - RNA, 24 nt, Artificial Sequence
  source: /note="Description of Artificial Sequence: Synthetic oligonucleotide"
uaaaauuuuuauauuacagaauau

SEQ ID NO: 641 - RNA, 24 nt, Artificial Sequence
  source: /note="Description of Artificial Sequence: Synthetic oligonucleotide"
auauaaaaauuuuaaaacaguaaa

SEQ ID NO: 642 - RNA, 24 nt, Artificial Sequence
  source: /note="Description of Artificial Sequence: Synthetic oligonucleotide"
aauauaaaaauuuuaaaacaguaa

SEQ ID NO: 643 - RNA, 24 nt, Artificial Sequence
  source: /note="Description of Artificial Sequence: Synthetic oligonucleotide"
uaauauaaaaauuuuaaaacagua

SEQ ID NO: 644 - RNA, 24 nt, Artificial Sequence
  source: /note="Description of Artificial Sequence: Synthetic oligonucleotide"
guaauauaaaaauuuuaaaacagu

SEQ ID NO: 645 - RNA, 24 nt, Artificial Sequence
  source: /note="Description of Artificial Sequence: Synthetic oligonucleotide"
uguaauauaaaaauuuuaaaacag

SEQ ID NO: 646 - RNA, 24 nt, Artificial Sequence
  source: /note="Description of Artificial Sequence: Synthetic oligonucleotide"
uauauucuguaauauaaaaauuuu

SEQ ID NO: 647 - RNA, 24 nt, Artificial Sequence
  source: /note="Description of Artificial Sequence: Synthetic oligonucleotide"
uuauauucuguaauauaaaaauuu

SEQ ID NO: 648 - RNA, 24 nt, Artificial Sequence
  source: /note="Description of Artificial Sequence: Synthetic oligonucleotide"
cagaauauaaaagauagucuacaa

SEQ ID NO: 649 - RNA, 24 nt, Artificial Sequence
  source: /note="Description of Artificial Sequence: Synthetic oligonucleotide"
cuaucuuuuauauucuguaauaua

SEQ ID NO: 650 - RNA, 24 nt, Artificial Sequence
  source: /note="Description of Artificial Sequence: Synthetic oligonucleotide"
acuaucuuuuauauucuguaauau

SEQ ID NO: 651 - RNA, 24 nt, Artificial Sequence
  source: /note="Description of Artificial Sequence: Synthetic oligonucleotide"
gacuaucuuuuauauucuguaaua

SEQ ID NO: 652 - RNA, 24 nt, Artificial Sequence
  source: /note="Description of Artificial Sequence: Synthetic oligonucleotide"
cauagcaagaagacagcagcauug

SEQ ID NO: 653 - RNA, 24 nt, Artificial Sequence
  source: /note="Description of Artificial Sequence: Synthetic oligonucleotide"
cauuuuguuaacuuuuucccauug

SEQ ID NO: 654 - RNA, 24 nt, Artificial Sequence
  source: /note="Description of Artificial Sequence: Synthetic oligonucleotide"
cauauauuuuucuugauacuugca

SEQ ID NO: 655 - RNA, 24 nt, Artificial Sequence
  source: /note="Description of Artificial Sequence: Synthetic oligonucleotide"
aaaucauuucugcaaguaucaaga

SEQ ID NO: 656 - RNA, 24 nt, Artificial Sequence
  source: /note="Description of Artificial Sequence: Synthetic oligonucleotide"
caaaucauuucugcaaguaucaag

SEQ ID NO: 657 - RNA, 24 nt, Artificial Sequence
  source: /note="Description of Artificial Sequence: Synthetic oligonucleotide"
acaaaucauuucugcaaguaucaa

SEQ ID NO: 658 - RNA, 24 nt, Artificial Sequence
  source: /note="Description of Artificial Sequence: Synthetic oligonucleotide"
auaaauucuacaguucccugaaaa

SEQ ID NO: 659 - RNA, 24 nt, Artificial Sequence
  source: /note="Description of Artificial Sequence: Synthetic oligonucleotide"
gaauuuauuucaguacccuccaug

SEQ ID NO: 660 - RNA, 24 nt, Artificial Sequence
  source: /note="Description of Artificial Sequence: Synthetic oligonucleotide"
aauuuauuucaguacccuccaugg

SEQ ID NO: 661 - RNA, 24 nt, Artificial Sequence
  source: /note="Description of Artificial Sequence: Synthetic oligonucleotide"
ugaaauaaauucuacaguucccug

SEQ ID NO: 662 - RNA, 24 nt, Artificial Sequence
  source: /note="Description of Artificial Sequence: Synthetic oligonucleotide"
auuuauuucaguacccuccaugga

SEQ ID NO: 663 - RNA, 24 nt, Artificial Sequence
  source: /note="Description of Artificial Sequence: Synthetic oligonucleotide"
cugaaauaaauucuacaguucccu

SEQ ID NO: 664 - RNA, 24 nt, Artificial Sequence
  source: /note="Description of Artificial Sequence: Synthetic oligonucleotide"
uuuauuucaguacccuccauggaa

SEQ ID NO: 665 - RNA, 24 nt, Artificial Sequence
  source: /note="Description of Artificial Sequence: Synthetic oligonucleotide"
uacccuccauggaaaaaagacagg

SEQ ID NO: 666 - RNA, 24 nt, Artificial Sequence
  source: /note="Description of Artificial Sequence: Synthetic oligonucleotide"
acccuccauggaaaaaagacaggg

SEQ ID NO: 667 - RNA, 24 nt, Artificial Sequence
  source: /note="Description of Artificial Sequence: Synthetic oligonucleotide"
cccuccauggaaaaaagacaggga

SEQ ID NO: 668 - RNA, 24 nt, Artificial Sequence
  source: /note="Description of Artificial Sequence: Synthetic oligonucleotide"
uuuuuuccauggaggguacugaaa

SEQ ID NO: 669 - RNA, 24 nt, Artificial Sequence
  source: /note="Description of Artificial Sequence: Synthetic oligonucleotide"
ugucuuuuuuccauggaggguacu

SEQ ID NO: 670 - RNA, 24 nt, Artificial Sequence
  source: /note="Description of Artificial Sequence: Synthetic oligonucleotide"
ccuugagcaagaaccaugcaaacu

SEQ ID NO: 671 - RNA, 24 nt, Artificial Sequence
  source: /note="Description of Artificial Sequence: Synthetic oligonucleotide"
ugcucaaggaaugcauuuucuuau

SEQ ID NO: 672 - RNA, 24 nt, Artificial Sequence
  source: /note="Description of Artificial Sequence: Synthetic oligonucleotide"
gcucaaggaaugcauuuucuuaug

SEQ ID NO: 673 - RNA, 24 nt, Artificial Sequence
  source: /note="Description of Artificial Sequence: Synthetic oligonucleotide"
ugcauuccuugagcaagaaccaug

SEQ ID NO: 674 - RNA, 24 nt, Artificial Sequence
  source: /note="Description of Artificial Sequence: Synthetic oligonucleotide"
gaaaauuuauuuccacauguaggu

SEQ ID NO: 675 - RNA, 24 nt, Artificial Sequence
  source: /note="Description of Artificial Sequence: Synthetic oligonucleotide"
aaaauuuauuuccacauguagguc

SEQ ID NO: 676 - RNA, 24 nt, Artificial Sequence
  source: /note="Description of Artificial Sequence: Synthetic oligonucleotide"
aaauuuauuuccacauguagguca

SEQ ID NO: 677 - RNA, 24 nt, Artificial Sequence
  source: /note="Description of Artificial Sequence: Synthetic oligonucleotide"
cauguggaaauaaauuuucauaag

SEQ ID NO: 678 - RNA, 24 nt, Artificial Sequence
  source: /note="Description of Artificial Sequence: Synthetic oligonucleotide"
acauguggaaauaaauuuucauaa

SEQ ID NO: 679 - RNA, 24 nt, Artificial Sequence
  source: /note="Description of Artificial Sequence: Synthetic oligonucleotide"
ccacauguaggucaaaaauguaau

SEQ ID NO: 680 - RNA, 24 nt, Artificial Sequence
  source: /note="Description of Artificial Sequence: Synthetic oligonucleotide"
cacauguaggucaaaaauguaaug

SEQ ID NO: 681 - RNA, 24 nt, Artificial Sequence
  source: /note="Description of Artificial Sequence: Synthetic oligonucleotide"
acauguaggucaaaaauguaauga

SEQ ID NO: 682 - RNA, 24 nt, Artificial Sequence
  source: /note="Description of Artificial Sequence: Synthetic oligonucleotide"
acauuuuugaccuacauguggaaa

SEQ ID NO: 683 - RNA, 24 nt, Artificial Sequence
  source: /note="Description of Artificial Sequence: Synthetic oligonucleotide"
cauuacauuuuugaccuacaugug

SEQ ID NO: 684 - RNA, 24 nt, Artificial Sequence
  source: /note="Description of Artificial Sequence: Synthetic oligonucleotide"
aaaaauaucauggcuggauugcaa

SEQ ID NO: 685 - RNA, 24 nt, Artificial Sequence
  source: /note="Description of Artificial Sequence: Synthetic oligonucleotide"
gcuggauugcaacaaaccaacagu

SEQ ID NO: 686 - RNA, 24 nt, Artificial Sequence
  source: /note="Description of Artificial Sequence: Synthetic oligonucleotide"
cuggauugcaacaaaccaacagug

SEQ ID NO: 687 - RNA, 24 nt, Artificial Sequence
  source: /note="Description of Artificial Sequence: Synthetic oligonucleotide"
ccuaugacuauggaugagagcauu

SEQ ID NO: 688 - RNA, 24 nt, Artificial Sequence
  source: /note="Description of Artificial Sequence: Synthetic oligonucleotide"
uagguaagaagauuacugagacau

SEQ ID NO: 689 - RNA, 24 nt, Artificial Sequence
  source: /note="Description of Artificial Sequence: Synthetic oligonucleotide"
auuacugagacauuaaauaacuug

SEQ ID NO: 690 - RNA, 24 nt, Artificial Sequence
  source: /note="Description of Artificial Sequence: Synthetic oligonucleotide"
uuacugagacauuaaauaacuugu

SEQ ID NO: 691 - RNA, 24 nt, Artificial Sequence
  source: /note="Description of Artificial Sequence: Synthetic oligonucleotide"
ggggaaaaauaugucaucagaguc

SEQ ID NO: 692 - RNA, 24 nt, Artificial Sequence
  source: /note="Description of Artificial Sequence: Synthetic oligonucleotide"
caugaucuggaaccauacugggga

SEQ ID NO: 693 - RNA, 24 nt, Artificial Sequence
  source: /note="Description of Artificial Sequence: Synthetic oligonucleotide"
acaugaucuggaaccauacugggg

SEQ ID NO: 694 - RNA, 24 nt, Artificial Sequence
  source: /note="Description of Artificial Sequence: Synthetic oligonucleotide"
gacaugaucuggaaccauacuggg

SEQ ID NO: 695 - RNA, 24 nt, Artificial Sequence
  source: /note="Description of Artificial Sequence: Synthetic oligonucleotide"
uacacacauacacaaagacaaaua

SEQ ID NO: 696 - RNA, 24 nt, Artificial Sequence
  source: /note="Description of Artificial Sequence: Synthetic oligonucleotide"
uacacauacacacauacacaaaga

SEQ ID NO: 697 - RNA, 24 nt, Artificial Sequence
  source: /note="Description of Artificial Sequence: Synthetic oligonucleotide"
aacacauacacauacacacauaca

SEQ ID NO: 698 - RNA, 24 nt, Artificial Sequence
  source: /note="Description of Artificial Sequence: Synthetic oligonucleotide"
auuccagucaaauaggucuggccu

SEQ ID NO: 699 - RNA, 24 nt, Artificial Sequence
  source: /note="Description of Artificial Sequence: Synthetic oligonucleotide"
uauuccagucaaauaggucuggcc

SEQ ID NO: 700 - RNA, 24 nt, Artificial Sequence
  source: /note="Description of Artificial Sequence: Synthetic oligonucleotide"
gcuggcaaaccacacuauuccagu

SEQ ID NO: 701 - RNA, 24 nt, Artificial Sequence
  source: /note="Description of Artificial Sequence: Synthetic oligonucleotide"
agucguuguguggcugacugcugg

SEQ ID NO: 702 - RNA, 24 nt, Artificial Sequence
  source: /note="Description of Artificial Sequence: Synthetic oligonucleotide"
cgccagauaucaauuaggcauaga

SEQ ID NO: 703 - RNA, 24 nt, Artificial Sequence
  source: /note="Description of Artificial Sequence: Synthetic oligonucleotide"
aaacuacucgauccugaagguugg

SEQ ID NO: 704 - RNA, 24 nt, Artificial Sequence
  source: /note="Description of Artificial Sequence: Synthetic oligonucleotide"
cauacuaaaagcagugguagucca

SEQ ID NO: 705 - RNA, 24 nt, Artificial Sequence
  source: /note="Description of Artificial Sequence: Synthetic oligonucleotide"
gaaaacauuaaacucuaccauacu

SEQ ID NO: 706 - RNA, 24 nt, Artificial Sequence
  source: /note="Description of Artificial Sequence: Synthetic oligonucleotide"
ugaaaacauuaaacucuaccauac

SEQ ID NO: 707 - RNA, 24 nt, Artificial Sequence
  source: /note="Description of Artificial Sequence: Synthetic oligonucleotide"
uuguucauuauccuuuuagagucu

SEQ ID NO: 708 - RNA, 24 nt, Artificial Sequence
  source: /note="Description of Artificial Sequence: Synthetic oligonucleotide"
aaaggauaaugaacaaaucaaagu

SEQ ID NO: 709 - RNA, 24 nt, Artificial Sequence
  source: /note="Description of Artificial Sequence: Synthetic oligonucleotide"
uauccuuuuagagucucaaauaua

SEQ ID NO: 710 - RNA, 24 nt, Artificial Sequence
  source: /note="Description of Artificial Sequence: Synthetic oligonucleotide"
acucuaaaaggauaaugaacaaau

SEQ ID NO: 711 - RNA, 24 nt, Artificial Sequence
  source: /note="Description of Artificial Sequence: Synthetic oligonucleotide"
uuuuagagucucaaauauagaaac

SEQ ID NO: 712 - RNA, 24 nt, Artificial Sequence
  source: /note="Description of Artificial Sequence: Synthetic oligonucleotide"
uuuagagucucaaauauagaaacc

SEQ ID NO: 713 - RNA, 24 nt, Artificial Sequence
  source: /note="Description of Artificial Sequence: Synthetic oligonucleotide"
uuagagucucaaauauagaaacca

SEQ ID NO: 714 - RNA, 24 nt, Artificial Sequence
  source: /note="Description of Artificial Sequence: Synthetic oligonucleotide"
uugagacucuaaaaggauaaugaa

SEQ ID NO: 715 - RNA, 24 nt, Artificial Sequence
  source: /note="Description of Artificial Sequence: Synthetic oligonucleotide"
uuugguuucuauauuugagacucu

SEQ ID NO: 716 - RNA, 24 nt, Artificial Sequence
  source: /note="Description of Artificial Sequence: Synthetic oligonucleotide"
uuuugguuucuauauuugagacuc

SEQ ID NO: 717 - RNA, 24 nt, Artificial Sequence
  source: /note="Description of Artificial Sequence: Synthetic oligonucleotide"
agcauugaagccauccaggaagug

SEQ ID NO: 718 - RNA, 24 nt, Artificial Sequence
  source: /note="Description of Artificial Sequence: Synthetic oligonucleotide"
gcuucaaugcucacuuguugaggc

SEQ ID NO: 719 - RNA, 24 nt, Artificial Sequence
  source: /note="Description of Artificial Sequence: Synthetic oligonucleotide"
ggcuucaaugcucacuuguugagg

SEQ ID NO: 720 - RNA, 24 nt, Artificial Sequence
  source: /note="Description of Artificial Sequence: Synthetic oligonucleotide"
aguggaaauguugccaaggccacc

SEQ ID NO: 721 - RNA, 24 nt, Artificial Sequence
  source: /note="Description of Artificial Sequence: Synthetic oligonucleotide"
guugccaaggccaccuaaagugac

SEQ ID NO: 722 - RNA, 24 nt, Artificial Sequence
  source: /note="Description of Artificial Sequence: Synthetic oligonucleotide"
gaagaacauuuucaguuacaucau

SEQ ID NO: 723 - RNA, 24 nt, Artificial Sequence
  source: /note="Description of Artificial Sequence: Synthetic oligonucleotide"
aucaaaugcacuauucucaacagg

SEQ ID NO: 724 - RNA, 24 nt, Artificial Sequence
  source: /note="Description of Artificial Sequence: Synthetic oligonucleotide"
auagugcauuugaugauguaacug

SEQ ID NO: 725 - RNA, 24 nt, Artificial Sequence
  source: /note="Description of Artificial Sequence: Synthetic oligonucleotide"
aauagugcauuugaugauguaacu

SEQ ID NO: 726 - RNA, 24 nt, Artificial Sequence
  source: /note="Description of Artificial Sequence: Synthetic oligonucleotide"
acuauucucaacagguaaagugug

SEQ ID NO: 727 - RNA, 24 nt, Artificial Sequence
  source: /note="Description of Artificial Sequence: Synthetic oligonucleotide"
uaccuaaaaaugcauauaaaacag

SEQ ID NO: 728 - RNA, 24 nt, Artificial Sequence
  source: /note="Description of Artificial Sequence: Synthetic oligonucleotide"
auaccuaaaaaugcauauaaaaca

SEQ ID NO: 729 - RNA, 24 nt, Artificial Sequence
  source: /note="Description of Artificial Sequence: Synthetic oligonucleotide"
cacguaauaccuaaaaaugcauau

SEQ ID NO: 730 - RNA, 24 nt, Artificial Sequence
  source: /note="Description of Artificial Sequence: Synthetic oligonucleotide"
gcacguaauaccuaaaaaugcaua

SEQ ID NO: 731 - RNA, 24 nt, Artificial Sequence
  source: /note="Description of Artificial Sequence: Synthetic oligonucleotide"
auauauaugugcacguaauaccua

SEQ ID NO: 732 - RNA, 24 nt, Artificial Sequence
  source: /note="Description of Artificial Sequence: Synthetic oligonucleotide"
uauauauaugugcacguaauaccu

SEQ ID NO: 733 - RNA, 24 nt, Artificial Sequence
  source: /note="Description of Artificial Sequence: Synthetic oligonucleotide"
auauauauaugugcacguaauacc

SEQ ID NO: 734 - RNA, 24 nt, Artificial Sequence
  source: /note="Description of Artificial Sequence: Synthetic oligonucleotide"
cugcacaauauuauaguuguugcu

SEQ ID NO: 735 - RNA, 24 nt, Artificial Sequence
  source: /note="Description of Artificial Sequence: Synthetic oligonucleotide"
auaaaaagagaaagauggaggaac

SEQ ID NO: 736 - RNA, 24 nt, Artificial Sequence
  source: /note="Description of Artificial Sequence: Synthetic oligonucleotide"
caccuagugaacuccauaaaaaga

SEQ ID NO: 737 - RNA, 24 nt, Artificial Sequence
  source: /note="Description of Artificial Sequence: Synthetic oligonucleotide"
auggugcaccuagugaacuccaua

SEQ ID NO: 738 - RNA, 24 nt, Artificial Sequence
  source: /note="Description of Artificial Sequence: Synthetic oligonucleotide"
aauggugcaccuagugaacuccau

SEQ ID NO: 739 - RNA, 24 nt, Artificial Sequence
  source: /note="Description of Artificial Sequence: Synthetic oligonucleotide"
gaauggugcaccuagugaacucca

SEQ ID NO: 740 - RNA, 24 nt, Artificial Sequence
  source: /note="Description of Artificial Sequence: Synthetic oligonucleotide"
gaccaaauguucagaugcaauuau

SEQ ID NO: 741 - RNA, 24 nt, Artificial Sequence
  source: /note="Description of Artificial Sequence: Synthetic oligonucleotide"
ucgcucacucacccugcaaaggac

SEQ ID NO: 742 - RNA, 24 nt, Artificial Sequence
  source: /note="Description of Artificial Sequence: Synthetic oligonucleotide"
agugagcgagaggcugcuuuggaa

SEQ ID NO: 743 - RNA, 24 nt, Artificial Sequence
  source: /note="Description of Artificial Sequence: Synthetic oligonucleotide"
gcagccucucgcucacucacccug

SEQ ID NO: 744 - RNA, 24 nt, Artificial Sequence
  source: /note="Description of Artificial Sequence: Synthetic oligonucleotide"
uugcaguaaucuaugaguuucuuc

SEQ ID NO: 745 - RNA, 24 nt, Artificial Sequence
  source: /note="Description of Artificial Sequence: Synthetic oligonucleotide"
cugcaacaguucccccuggaccug

SEQ ID NO: 746 - RNA, 24 nt, Artificial Sequence
  source: /note="Description of Artificial Sequence: Synthetic oligonucleotide"
ugcaacaguucccccuggaccugg

SEQ ID NO: 747 - RNA, 24 nt, Artificial Sequence
  source: /note="Description of Artificial Sequence: Synthetic oligonucleotide"
uuucuugccuggcuuacagaagcu

SEQ ID NO: 748 - RNA, 24 nt, Artificial Sequence
  source: /note="Description of Artificial Sequence: Synthetic oligonucleotide"
uuucagcuucuguaagccaggcaa

SEQ ID NO: 749 - RNA, 24 nt, Artificial Sequence
  source: /note="Description of Artificial Sequence: Synthetic oligonucleotide"
guccuacaggaugcuacccguaag

SEQ ID NO: 750 - RNA, 24 nt, Artificial Sequence
  source: /note="Description of Artificial Sequence: Synthetic oligonucleotide"
ggcuccuagaagacuccaagggag

SEQ ID NO: 751 - RNA, 24 nt, Artificial Sequence
  source: /note="Description of Artificial Sequence: Synthetic oligonucleotide"
gcuccuagaagacuccaagggagu

SEQ ID NO: 752 - RNA, 24 nt, Artificial Sequence
  source: /note="Description of Artificial Sequence: Synthetic oligonucleotide"
cuccaagggaguaaaagagcugau

SEQ ID NO: 753 - RNA, 24 nt, Artificial Sequence
  source: /note="Description of Artificial Sequence: Synthetic oligonucleotide"
uggauccacaagagugcuaaagcg

SEQ ID NO: 754 - RNA, 24 nt, Artificial Sequence
  source: /note="Description of Artificial Sequence: Synthetic oligonucleotide"
guucaauuggauccacaagagugc

SEQ ID NO: 755 - RNA, 24 nt, Artificial Sequence
  source: /note="Description of Artificial Sequence: Synthetic oligonucleotide"
uacuuguaacugacaagccaggga

SEQ ID NO: 756 - RNA, 24 nt, Artificial Sequence
  source: /note="Description of Artificial Sequence: Synthetic oligonucleotide"
acuuguaacugacaagccagggac

SEQ ID NO: 757 - RNA, 24 nt, Artificial Sequence
  source: /note="Description of Artificial Sequence: Synthetic oligonucleotide"
guaacugacaagccagggacaaaa

SEQ ID NO: 758 - RNA, 24 nt, Artificial Sequence
  source: /note="Description of Artificial Sequence: Synthetic oligonucleotide"
uaacugacaagccagggacaaaac

SEQ ID NO: 759 - RNA, 24 nt, Artificial Sequence
  source: /note="Description of Artificial Sequence: Synthetic oligonucleotide"
ucccuggcuugucaguuacaagua

SEQ ID NO: 760 - RNA, 24 nt, Artificial Sequence
  source: /note="Description of Artificial Sequence: Synthetic oligonucleotide"
cagaguaacagucugaguaggagc

SEQ ID NO: 761 - RNA, 24 nt, Artificial Sequence
  source: /note="Description of Artificial Sequence: Synthetic oligonucleotide"
uacuuuguuuagcaauacauggua

SEQ ID NO: 762 - RNA, 24 nt, Artificial Sequence
  source: /note="Description of Artificial Sequence: Synthetic oligonucleotide"
uggcucaaauuguuacucuucaau

SEQ ID NO: 763 - RNA, 24 nt, Artificial Sequence
  source: /note="Description of Artificial Sequence: Synthetic oligonucleotide"
cuuucaaagaacuuugcagagccu

SEQ ID NO: 764 - RNA, 24 nt, Artificial Sequence
  source: /note="Description of Artificial Sequence: Synthetic oligonucleotide"
guugaagccauuuuguugcucuuu

SEQ ID NO: 765 - RNA, 24 nt, Artificial Sequence
  source: /note="Description of Artificial Sequence: Synthetic oligonucleotide"
guugaagccauuuuauugcucuuu

SEQ ID NO: 766 - RNA, 24 nt, Artificial Sequence
  source: /note="Description of Artificial Sequence: Synthetic oligonucleotide"
uuuugaggcucugcaaaguucuuu

SEQ ID NO: 767 - RNA, 24 nt, Artificial Sequence
  source: /note="Description of Artificial Sequence: Synthetic oligonucleotide"
aguuauuaaugcauagauauucag

SEQ ID NO: 768 - RNA, 24 nt, Artificial Sequence
  source: /note="Description of Artificial Sequence: Synthetic oligonucleotide"
uauaauaugcccuguaauauaaua

SEQ ID NO: 769 - RNA, 24 nt, Artificial Sequence
  source: /note="Description of Artificial Sequence: Synthetic oligonucleotide"
uaaaggccaaaccucggcuuaccu

SEQ ID NO: 770 - RNA, 24 nt, Artificial Sequence
  source: /note="Description of Artificial Sequence: Synthetic oligonucleotide"
ucaauaucuuugaaggacucuggg

SEQ ID NO: 771 - protein, 11 aa, Homo sapiens
MLWWEEVEDCY

SEQ ID NO: 772 - protein, 7 aa, Homo sapiens
MSEVSSD

SEQ ID NO: 773 - protein, 16 aa, Homo sapiens
MTEIILLIFFPAYFLN

SEQ ID NO: 774 - protein, 13 aa, Homo sapiens
MSARKLRNLSYKK

SEQ ID NO: 775 - protein, 10 aa, Homo sapiens
MLHRKTYHVK

SEQ ID NO: 776 - DNA, 35 bp, Homo sapiens
tattttagctcctactcagactgttactctggtga

SEQ ID NO: 777 - RNA, 45 nt, Artificial Sequence
  source: /note="Description of Artificial Sequence: Synthetic oligonucleotide"
uaauuucuacuaaguguagaugcuccuacucagacuguuacucug

SEQ ID NO: 778 - DNA, 33 bp, Artificial Sequence
  source: /note="Description of Artificial Sequence: Synthetic oligonucleotide"
  CDS (1)..(30)
ataaagctcctactcagactgttactctggtga

SEQ ID NO: 779 - protein, 10 aa, Artificial Sequence
  source: /note="Description of Artificial Sequence: Synthetic peptide"
IKLLLRLLLW

SEQ ID NO: 780 - DNA, 33 bp, Artificial Sequence
  source: /note="Description of Artificial Sequence: Synthetic oligonucleotide"
  CDS (1)..(33)
ataaagctcctactcagactggtgacacaacct

SEQ ID NO: 781 - protein, 11 aa, Artificial Sequence
  source: /note="Description of Artificial Sequence: Synthetic peptide"
IKLLLRLVTQP

SEQ ID NO: 782 - DNA, 40 bp, Artificial Sequence
  source: /note="Description of Artificial Sequence: Synthetic oligonucleotide"
aaatattttagctcctactcagactgttactctggtgaca

SEQ ID NO: 783 - DNA, 40 bp, Artificial Sequence
  source: /note="Description of Artificial Sequence: Synthetic oligonucleotide"
cttttcattctctaccatgtattgctaaactctggtgaca

SEQ ID NO: 784 - DNA, 33 bp, Artificial Sequence
  source: /note="Description of Artificial Sequence: Synthetic oligonucleotide"
  CDS (1)..(33)
ataaaggcaacaatgcaggatttggaacagaga

SEQ ID NO: 785 - protein, 11 aa, Artificial Sequence
  source: /note="Description of Artificial Sequence: Synthetic peptide"
IKATMQDLEQR

SEQ ID NO: 786 - DNA, 52 bp, Mus sp.
gctctgcaaagttctttgaaagagcaataaaatggcttcaactatctgagtg

SEQ ID NO: 787 - RNA, 45 nt, Artificial Sequence
  source: /note="Description of Artificial Sequence: Synthetic oligonucleotide"
uaauuucuacuaaguguagauaaagagcaauaaaauggcuucaac

SEQ ID NO: 788 - DNA, 33 bp, Mus sp.
tctttgaaagagcaataaaatggcttcaactat

SEQ ID NO: 789 - DNA, 33 bp, Artificial Sequence
  source: /note="Description of Artificial Sequence: Synthetic oligonucleotide"
tctttaaaggagcagcagaatggcttcaactat

SEQ ID NO: 790 - DNA, 39 bp, Mus sp.
  CDS (1)..(39)
agttctttgaaagagcaacaaaatggcttcaactatctg

SEQ ID NO: 791 - protein, 13 aa, Mus sp.
SSLKEQQNGFNYL

SEQ ID NO: 792 - DNA, 39 bp, Mus sp.
  CDS (1)..(18)
  CDS (22)..(39)
agttctttgaaagagcaataaaatggcttcaactatctg

SEQ ID NO: 793 - protein, 6 aa, Mus sp.
SSLKEQ

SEQ ID NO: 794 - protein, 6 aa, Mus sp.
NGFNYL

SEQ ID NO: 795 - DNA, 39 bp, Mus sp.
  CDS (1)..(39)
agttctttaaaggagcagcagaatggcttcaactatctg

SEQ ID NO: 796 - protein, 13 aa, Mus sp.
SSLKEQQNGFNYL

SEQ ID NO: 797 - DNA, 49 bp, Homo sapiens
tattttagctcctactcagactgttactctggtgacacaacctgtggtt

SEQ ID NO: 798 - DNA, 46 bp, Homo sapiens
tattttagctcctactcagactactctggtgacacaacctgtggtt

SEQ ID NO: 799 - DNA, 23 bp, Homo sapiens
tattttagctacaacctgtggtt

SEQ ID NO: 800 - DNA, 40 bp, Homo sapiens
  modified_base (29)..(29): a, c, t, g, unknown or other
tattttagctcctactcagtaggtgacanaacctgtggtt

SEQ ID NO: 801 - DNA, 46 bp, Homo sapiens; identical to SEQ ID NO: 798

SEQ ID NO: 802 - DNA, 34 bp, Homo sapiens
tattttagctcctactcagacacaacctgtggtt

SEQ ID NO: 803 - DNA, 41 bp, Homo sapiens
tattttagctcctactcactctggtgacacaacctgtggtt

SEQ ID NO: 804 - DNA, 46 bp, Homo sapiens; identical to SEQ ID NO: 798

SEQ ID NO: 805 - DNA, 40 bp, Homo sapiens
tattttagctcctactcagactgtgacacaacctgtggtt

SEQ ID NO: 806 - DNA, 43 bp, Homo sapiens
tattttagctcctactcagactgtggtgacacaacctgtggtt

SEQ ID NO: 807 - DNA, 36 bp, Homo sapiens
tattttagttccactctggtgacacaacctgtggtt

SEQ ID NO: 808 - DNA, 43 bp, Homo sapiens
tattttagctcctactcagactctggtgacacaacctgtggtt

SEQ ID NO: 809 - DNA, 36 bp, Homo sapiens
tattttagctcctactcagtgacacaacctgtggtt

SEQ ID NO: 810 - DNA, 43 bp, Homo sapiens; identical to SEQ ID NO: 808

SEQ ID NO: 811 - DNA, 42 bp, Homo sapiens
tattttagctcctactcagactgtgtgacacaacctgtggtt

SEQ ID NO: 812 - DNA, 35 bp, Homo sapiens
tattttagctcctactcgggacacaacctgtggtt

SEQ ID NO: 813 - DNA, 49 bp, Homo sapiens
tattttagctcccactcaggtaggacacaacctgtggttactaagtaac

SEQ ID NO: 814 - DNA, 41 bp, Homo sapiens
tactttagctcctactcagactggtgacacaacctgtggtt

SEQ ID NO: 815 - DNA, 37 bp, Homo sapiens
tattttagctcctactcatactaaggaaactgtggtt

SEQ ID NO: 816 - DNA, 43 bp, Homo sapiens; identical to SEQ ID NO: 808

SEQ ID NO: 817 - DNA, 42 bp, Homo sapiens
tattttagctcctactcagacttggtgacacaacctgtggtt

SEQ ID NO: 818 - DNA, 41 bp, Homo sapiens
tattttagctcctactcagactggtgacacaacctgtggtt

SEQ ID NO: 819 - DNA, 28 bp, Homo sapiens
tattttagctcctactcagactgtggtt

SEQ ID NO: 820 - DNA, 46 bp, Homo sapiens; identical to SEQ ID NO: 798

SEQ ID NO: 821 - DNA, 32 bp, Homo sapiens
tattttagctcctggtgacacaacctgtggtt

SEQ ID NO: 822 - DNA, 36 bp, Homo sapiens
tattttagctcctactcagacacacaacctgtggtt

SEQ ID NO: 823 - DNA, 43 bp, Homo sapiens; identical to SEQ ID NO: 808

SEQ ID NO: 824 - DNA, 43 bp, Homo sapiens; identical to SEQ ID NO: 808

SEQ ID NO: 825 - DNA, 41 bp, Homo sapiens; identical to SEQ ID NO: 818

SEQ ID NO: 826 - DNA, 41 bp, Homo sapiens
tattttagctcctactcagtctggtgacacaacctgtggtt

SEQ ID NO: 827 - DNA, 52 bp, Mus sp.
gcaaagttctttgaaagagcaacaaaatggcttcaactatctgagtgacact

SEQ ID NO: 828 - DNA, 50 bp, Mus sp.
gcaaagttctttgaaagagcaacaaaatggtcaactatctgagtgacact

SEQ ID NO: 829 - DNA, 48 bp, Mus sp.
gcaaagttctttgaaagagcaacaaaatggaactatctgagtgacact

SEQ ID NO: 830 - DNA, 46 bp, Mus sp.
gcaaagttctttgaaagagcaacaaaatggatatctgagtgacact

SEQ ID NO: 831 - DNA, 35 bp, Mus sp.
gcaaagttctttgaaagagctatctgagtgacact

SEQ ID NO: 832 - DNA, 52 bp, Mus sp.
gtgtaaatgaacttctatttaattttgaggctctgcaaagttctttgaaaga

SEQ ID NO: 833 - DNA, 36 bp, Mus sp.
gtgtaaatgaacttctattgaaagttctttgaaaga

SEQ ID NO: 834 - DNA, 745 bp, Homo sapiens
aattaagcatgttgctgagagggaactgtttttttgttggtttgttttcactaatgtttgcactctacttcctttaaataaaattatgcctggagaaagggtttttgtatggagcaattgataaatatttgatgggtggttggctaaaataattataattcctttaaaagaaattctacccactaaagttaatttagaagtaaaatataatagaaatccaataatatattcaccaaatggattaagatgttcatgaattatcttcaaagtgttaatcgaataagtaatgtgtatgcttttctgttaaagaggaagttagaagatctgagctctgagtggaaggcggtaaaccgtttacttcaagagctgagggcaaagcagcctgacctagctcctggactgaccactattggagcctgtaagtatactggatcccattctctttggctctagctatttgttcaaaagtgcaactatgaagtgatgactgggtgagagagaaaatttgtttcaattctaaagatagagataaacctttgtgttattgactgtgcaaaaagtcttagagtacattccttggaaattgactctgattcaaagtgttgcatgacaacgggatatggggagtgttctctggagatacacccacaaggaagagaagagcacagggagattgtggagagtctgaaatgtgatttgtctgcagcagaggcctaagccagtctcgcaggagcctacactggct

SEQ ID NO: 835 - DNA, 907 bp, Homo sapiens
cttatcccatcttgttttgcctttgttttttcttgaataaaaaaaaaataagtaaaatttatttccctggcaaggtctgaaaacttttgttttctttaccacttccacaatgtatatgattgttactgagaaggcttatttaacttaagttacttgtccaggcatgagaatgagcaaaatcgttttttaaaaaattgttaaatgtatattaatgaaaaggttgaatcttttcattttctaccatgtattgctaaacaaagtatccacattgttagaaaaagatatataatgtcatgaataagagtttggctcaaattgttactcttcaattaaatttgacttattgttattgaaattggctctttagcttgtgtttctaatttttctttttcttcttttttcctttttgcaaaaacccaaaatattttagctcctactcagactgttactctggtgacacaacctgtggttactaaggaaactgccatctccaaactagaaatgccatcttccttgatgttggaggtacctgctctggcagatttcaaccgggcttggacagaacttaccgactggctttctctgcttgatcaagttataaaatcacagagggtgatggtgggtgaccttgaggatatcaacgagatgatcatcaagcagaaggtatgagaaaaaatgataaaagttggcagaagtttttctttaaaatgaagattttccaccaatcactttactctcctagaccatttcccaccagttcttaggcaactgtttctctctcagcaaacacattactctcactattcagcctaagtataatcaaggatataaattaatgcaaataacaaaagtagccatacattaaaaaggaaatatacaaaaaaaaaaaaaaaaaaaagcagaaacc

1. A composition comprising a sequence encoding a Cpf1 polypeptide and a sequence encoding a DMD guide RNA (gRNA), wherein the DMD gRNA targets a dystrophin splice site, and wherein the DMD gRNA comprises any one of SEQ ID No. 448 to 770.

2. The composition of claim 1, wherein the sequence encoding the Cpf1 polypeptide is isolated or derived from a sequence encoding a Lachnospiraceae Cpf1 polypeptide or an Acidaminococcus Cpf1 polypeptide.

3-7. (canceled)

8. The composition of claim 1, wherein a first vector comprises the sequence encoding the Cpf1 polypeptide and a second vector comprises the sequence encoding the DMD gRNA.

9. The composition of claim 8, wherein the first vector or the sequence encoding the Cpf1 polypeptide further comprises a first polyA sequence.

10. The composition of claim 8, wherein the second vector or the sequence encoding the DMD gRNA further comprises a second polyA sequence.

11. The composition of claim 8, wherein the first vector or the sequence encoding the Cpf1 polypeptide further comprises a first promoter sequence.

12. The composition of claim 8, wherein the second vector or the sequence encoding the DMD gRNA further comprises a second promoter sequence.

13. The composition of claim 11, wherein the first promoter sequence and the second promoter sequence are identical.

14. The composition of claim 11, wherein the first promoter sequence and the second promoter sequence are not identical.

15-16. (canceled)

17. The composition of claim 11, wherein the first promoter sequence or the second promoter sequence comprises a muscle-cell specific promoter.

18. The composition of claim 17, wherein the muscle-cell specific promoter is a myosin light chain-2 promoter, an α-actin promoter, a troponin 1 promoter, a Na⁺/Ca²⁺ exchanger promoter, a dystrophin promoter, an α7 integrin promoter, a brain natriuretic peptide promoter, an αB-crystallin/small heat shock protein promoter, an α-myosin heavy chain promoter, or an ANF promoter.

19-37. (canceled)

38. The composition of claim 1, wherein the composition comprises a sequence codon optimized for expression in a mammalian cell.

39. The composition of claim 38, wherein the composition comprises a sequence codon optimized for expression in a human cell.

40. The composition of claim 39, wherein the sequence encoding the Cpf1 polypeptide is codon optimized for expression in human cells.

41. The composition of claim 1, wherein the splice site is a splice donor site.

42. The composition of claim 1, wherein the splice site is a splice acceptor site.

43-48. (canceled)

49. The composition of claim 8, wherein the first vector or the second vector is a viral vector.

50. (canceled)

51. The composition of claim 49, wherein the viral vector is an adeno-associated viral (AAV) vector.

52. The composition of claim 51, wherein the AAV vector is replication-defective or conditionally replication defective.

53. The composition of claim 51, wherein the AAV vector is a recombinant AAV vector.

54. The composition of claim 51, wherein the AAV vector comprises a sequence isolated or derived from an AAV vector of serotype AAV1, AAV2, AAV3, AAV4, AAV5, AAV6, AAV7, AAV8, AAV9, AAV10, AAV11 or any combination thereof.

55. (canceled)

56. The composition of claim 1, further comprising a pharmaceutically acceptable carrier.

57. A cell comprising the composition of claim 1.

58. The cell of claim 57, wherein the cell is a muscle cell, a satellite cell or a precursor thereof.

59. The cell of claim 57, wherein the cell is an iPSC or an iCM.

60. A composition comprising the cell of claim 57.

61. A method of correcting a dystrophin gene defect comprising contacting a cell and a composition of claim 1 under conditions suitable for expression of the Cpf1 polypeptide and the gRNA, wherein the Cpf1 polypeptide disrupts the dystrophin splice site; and wherein disruption of the splice site results in selective skipping of a mutant DMD exon.

62. The method of claim 61, wherein the mutant DMD exon is exon 23.

63. The method of claim 61, wherein the mutant DMD exon is exon 51.

64. The method of claim 61, wherein the cell is in vivo, ex vivo, in vitro or in situ.

65. A cell produced by the method of claim 61.

66. A composition comprising the cell of claim 65.

67. A method of treating muscular dystrophy in a subject in need thereof comprising administering to the subject a therapeutically effective amount of a composition of claim 1.

68. The method of claim 67, wherein the composition is administered locally.

69. (canceled)

70. The method of claim 68, wherein the composition is administered to a muscle tissue by intramuscular infusion or injection.

71. The method of claim 70, wherein the muscle tissue comprises a tibialis anterior tissue, a quadricep tissue, a soleus tissue, a diaphragm tissue or a heart tissue.

72. The method of claim 67, wherein the composition is administered systemically, such as by intravenous infusion or injection.

73-79. (canceled)

80. The method of claim 67, wherein the subject is a neonate, an infant, a child, a young adult, or an adult.

81. The method of claim 67, wherein the subject has muscular dystrophy.

82. (canceled)

83. The method of claim 67, wherein the subject is male.

84-96. (canceled)

97. The method of claim 67, wherein the subject is less than 10 years old.

98. (canceled)

99. The method of claim 97, wherein the subject is less than 2 years old.

100-102. (canceled)
